(19) United States
(12) Patent Application Publication
(10) Pub. No.: US 2009/0017052 A1
(43) Pub. Date: Jan. 15, 2009

(54) Methods of determining lethality of pathogens and malignancies involving replikin peak genes

(76) Inventors: Samuel Bogoch, New York, NY (US); Elenore S. Bogoch, New York, NY (US); Samuel Winston Bogoch, Oakland, CA (US); Anne Elenore Borsanyi, Brookline, MA (US)

Correspondence Address: MILBANK, TWEED, HADLEY & MCCLOY LLP, INTERNATIONAL SQUARE BUILDING, 1850 K STRET, N.W., SUITE 1100, WASHINGTON, DC, 20006, US

(21) Appl. No.: 12/010,027

(22) Filed: Jan. 18, 2008

Related U.S. Application Data
(60) Provisional application No. 60/991,676, filed on Nov. 30, 2007.
(60) Provisional application No. 60/982,336, filed on Oct. 24, 2007.
(60) Provisional application No. 60/982,333, filed on Oct. 24, 2007.
(60) Provisional application No. 60/982,338, filed on Oct. 24, 2007.
(60) Provisional application No. 60/935,816, filed on Aug. 31, 2007.
(60) Provisional application No. 60/935,499, filed on Aug. 16, 2007.
(60) Provisional application No. 60/954,743, filed on Aug. 8, 2007.
(60) Provisional application No. 60/898,097, filed on Jan. 30, 2007.
(60) Provisional application No. 60/880,966, filed on Jan. 18, 2007.

(51) Int. Cl. A61K 39/00; C12Q 1/70; C12Q 1/68; C07H 21/04; G06G 7/50; A61P 31/00; C07K 7/00; C12Q 1/02; C07H 1/00; A61K 31/7088

(52) U.S. Cl. 424/185.1; 435/5; 435/6; 536/23.5; 536/23.7; 536/23.72; 703/11; 435/29; 536/25.4; 514/44; 424/204.1; 424/206.1; 424/234.1; 424/277.1; 424/221.1; 424/248.1; 424/243.1; 424/272.1; 530/327

(57) ABSTRACT

The present invention provides methods of identifying lethal, virulent and rapidly replicating viruses, organisms, and malignancies comprising comparing Replikin concentrations among different viruses, organisms, or malignancies. The present invention further provides isolated Replikin Peak Genes associated with increased lethality, virulence and rapid replication, for diagnostic, therapeutic and predictive purposes.

[0001] The instant application contains a “lengthy” Sequence Listing which has been submitted via CD-R in lieu of a printed paper copy, and is hereby incorporated by reference in its entirety. Said CD-R, recorded on Jan. 17, 2008, are labeled CRF, “Copy 1” and “Copy 2”, respectively, and each contains only one identical 1.36 Mb file (27129301.txt).

[0002] This application claims priority to U.S. Provisional Appln. Ser. No. 60/991,676, filed Nov. 30, 2007, U.S. application Ser. No. 11/923,559, filed Oct. 24, 2007, U.S. Provisional Appln. Ser. No. 60/982,336, filed Oct. 24, 2007, U.S. Provisional Appln. Ser. No. 60/982,333, filed Oct. 24, 2007, U.S. Provisional Appln. Ser. No. 60/982,338, filed Oct. 24, 2007, U.S. Provisional Appln. Ser. No. 60/935,816, filed Aug. 31, 2007, U.S. Provisional Appln. Ser. No. 60/935,499 filed Aug. 16, 2007, U.S. Provisional Appln. Ser. No. 60/954,743, filed Aug. 8, 2007, U.S. application Ser. No. 11/755,597, filed May 30, 2007, U.S. Provisional Appln. Ser. No. 60/898,097, filed Jan. 30, 2007, and U.S. Provisional Appln. Ser. No. 60/880,966, filed Jan. 18, 2007, each of which is incorporated herein by reference in its entirety. This application additionally incorporates herein by reference: U.S. Provisional Appln. Ser. No. 60/853,744, filed Oct. 24, 2006, U.S. application Ser. No. 11/355,120, filed Feb. 16, 2006, U.S. application Ser. No. 11/116,203, filed Apr. 28, 2005, U.S. application Ser. No. 10/860,050, filed Jun. 4, 2004, U.S. application Ser. No. 10/189,437, filed Jul. 8, 2002, U.S. application Ser. No. 10/105,232, filed Mar. 26, 2002, now U.S. Pat. No. 7,189,800, U.S. application Ser. No. 09/984,057, filed Oct. 26, 2001, and U.S. application Ser. No. 09/984,056, filed Oct. 26, 2001, now U.S. Pat. No. 7,176,275, each in its entirety.

### TECHNICAL FIELD OF THE INVENTION

[0003] This invention relates generally to identifying virulent and lethal strains of pathogenic viruses, pathogenic organisms and malignancies through identifying concentrations of the class of small peptides known as Replikins, and to diagnosis, prevention and treatment of disease from such virulent and lethal pathogens and malignancies.

### BACKGROUND OF THE INVENTION

[0004] Rapid replication is characteristic of virulence in, among other things, certain bacteria, viruses and malignancies. The inventors have described a quantitative chemistry common to rapid replication in different organisms, viruses and malignancies. The chemistry of rapid replication described by the inventors is present in a family of conserved small protein sequences related to rapid replication called Replikins. A correlation between increased concentrations of Replikin sequences and increased replication and virulence has been observed in a range of viruses and organisms. Replikin sequences, therefore, offer new targets for developing effective methods of predicting and treating viral outbreaks.

### Replikin Sequences in Malignancies and Viral and Bacterial Pathogens

[0005] A Replikin sequence is an amino acid sequence of 7 to about 50 amino acids comprising a Replikin motif. A Replikin motif comprises (1) at least one lysine residue located at a first terminus of the motif and at least one lysine residue or at least one histidine residue located at a second terminus of the motif; (2) a first lysine residue located six to ten residues from a second lysine residue; (3) at least one histidine residue; and (4) at least 6% lysine residues. A Replikin sequence may comprise a terminal lysine and may further comprise a terminal lysine or a terminal histidine. A Replikin peptide or Replikin protein is a peptide or protein consisting of a Replikin sequence.

[0006] The inventors have identified Replikin sequences in oncogenic cells and in viral and organismal proteins associated with rapid replication and virulence. Additionally, higher concentrations of Replikin sequences in the genomic code have now been associated with a variety of infectious and pathogenic agents including human cancer, HIV, plant viruses, and a range of pathogenic animal and human viruses. Further, the correlation between the concentration of Replikin sequences in viral or organismal proteins and major outbreaks of disease and the correlation between the concentration of Replikin sequences in malignancies and poor prognoses are both significant.

[0007] Replikin sequences have been observed to be conserved in human cancers generally and in many pathogenic organisms and viruses, including conservation in both intrastrain and interstrain influenza viruses, for as long as 90 years based on data going back to the 1917-18 flu pandemic. Concentration of Replikin sequences in viral genomes has been shown to increase prior to strain-specific outbreaks and increased mortality in SARS, in influenza, in H5N1 bird flu and now in many other viral and non-viral pathogens. An increase in concentration of production of proteins containing Replikin sequences also has been shown in cancer as replication increases.

[0008] Within the last century there have been three influenza pandemics, each strain specific: H1N1 in 1918; H2N2 in 1957; and H3N2 in 1968. The inventors have established that prior to each pandemic there was a strain-specific increase in the concentration of Replikin sequences within the strain. The strain-specific increase in Replikin concentration was followed by a decrease in Replikin concentration and several years later a rebound increase in Replikin concentration associated with a strain-specific rebound epidemic. The Replikin algorithm provided the first chemistry that correlated with influenza epidemics and pandemics.

[0009] A similar correlation between the outbreaks of H5NI (Bird Flu) between 1997 and 2007 and the concentration of Replikin sequences in the viral proteins has been demonstrated. Likewise, a correlation has been established between the global outbreak of SARS coronavirus in 2003 and an increase in the concentration of Replikin sequences in the proteins of coronavirus. In another study, Replikins in two strains of human HIV-1 virus demonstrated that the Replikin concentration in the rapidly replicating strain was six fold greater than that of the slowly replicating strain. No instances of rapid replication have been observed in all the viruses and organisms examined wherein the Replikin concentration did not significantly increase as compared to the Replikin concentration in the dormant state.

[0010] The Replikin algorithm was initially discovered in Glycoprotein 10B, a membrane glycoprotein isolated from brain glioblastoma multiforme, lymphoma and breast cancer cells (U.S. Pat. No. 6,242,578 B1). A constituent peptide of Aglyco 10B, malignin, was observed to be enriched in cell membranes tenfold during anaerobic replication while cell number was observed to increase only five-fold. This increase in membrane concentration of the malignin protein in rapid replication of glioma cells suggested an integral relationship of the Replikins in malignin to replication of the glioblastoma multiforme.

[0011] Hydrolysis and mass spectrometry of malignin yielded a 16-mer peptide that included the Replikin sequence kagvaflhkk (SEQ ID NO: 3658). This peptide, which is absent from the normal human genome, was assumed to be acquired. Homologues of the Replikin sequence were found in all tumor viruses (that is viruses that cause cancer), and in replicating proteins of algae, plants, fungi, viruses and bacteria.

[0012] When the glioma Replikin was synthesized in vitro and administered as a synthetic vaccine to rabbits, abundant antimalignin antibody was produced. This production of abundant antimalignin antibody established that the peptide alone is an epitope, that is, it is a sufficient basis for an immune response observed in cancer patients wherein antimalignin antibodies are naturally produced. A 16-mer peptide containing the glioma Replikin produced both IgM and IgG forms of the antibody.

[0013] A study of 8,090 serum specimens from cancer patients and controls demonstrated that the concentration of antimalignin antibody increases with age in healthy individuals, as the incidence of cancer in the population increases, and increases further two to three-fold in early malignancy, regardless of cell type. In vitro this antibody was observed to be cytotoxic to cancer cells at picograms (femtomoles) per cancer cell, and in vivo the concentration of antimalignin antibody related quantitatively to the survival of cancer patients. As shown in glioma cells, the stage in cancer at which cells have only been transformed to the immortal malignant state but remain quiescent or dormant, now can be distinguished from the more active life-threatening replicating state which is characterized by the increased concentration of Replikins.

[0014] Using the sequence of the glioma Replikin peptide (kagvaflhkk) (SEQ ID NO: 3658) as a template, and constructing a “3-point-recognition” method to visually scan protein sequences of several different organisms, a new class of peptides, the Replikins, was revealed in organisms as diverse as algae, yeast and viruses. Surprisingly, these peptides were found to be concentrated in larger “replicating” and “transforming” proteins.

[0015] An infrequent occurrence of homologues was observed in “virus peptides” as a whole (1.5%), and in other peptides not designated as associated with malignant transformation or replication such as “brain peptides” and “neuropeptides” (together 8.5%). A surprisingly high frequency of occurrence of homologues was identified in tumor viruses, transforming proteins and cancer cell proteins. For example, 100% of identified tumor viruses contain Replikin sequences. 85% of transforming proteins contained Replikin sequences and 97% of cancer proteins contained Replikin sequences.

[0016] Further, Replikins were identified in such proteins as Saccharomyces cerevisiae replication binding protein; the replication associated protein A of maize streak virus; the replication-associated protein of Staphylococcus aureus; the DNA replication protein of bovine herpes virus 4; and the mealigrid herpes virus 1 replication binding protein. Replikin-containing proteins also are associated frequently with redox functions, and protein synthesis or elongation, as well as with cell replication.

[0017] The highest concentration of Replikin sequences in an organism or virus that had been analyzed and reported was 111 Replikin sequences per 100 amino acids in the extraordinarily-rapidly-replicating parasitic protozoa Plasmodium falciparum (reportedly responsible for 90% of malarial deaths in humans) (herein sometimes referred to as malaria). P. falciparum has been observed to replicate 11,000 times in 48 hours during passage of the parasite from liver to blood in the host.

[0018] A significant feature of Replikin sequences observed in P. falciparum was a marked overlapping of Replikin structures throughout malarial proteins. For example, there are nine overlapping Replikins in the 39 amino acid sequence of SEQ ID NO. 3667 (Replikin concentration=23.1/100 amino acids); and 15 overlapping Replikins in the 41 amino acids of SEQ ID NO. 3668 (Replikin concentration=36.6/100 amino acids). Both of these overlapping Replikin structures occur in blood stage trophozoites and schizonts. This mechanism of lysine multiples was also seen in the Replikins of cancer proteins such as in gastric cancer transforming protein, ktkkgnrvsptmkvth (SEQ ID NO: 3669), and in transforming protein P21B (K-RAS 2B) of lung, khkekmskdgkkkkkks (SEQ ID NO: 3670).

### Replikin Scaffolds

[0019] In monitoring Replikin sequences in influenza virus, the inventors have additionally identified a sub-family of conserved Replikin sequences known as Replikin Scaffolds or Replikin Scaffold sequences. Replikin Scaffolds were initially identified in conserved structures in particularly virulent influenza viruses. Included among these strains were the viruses causing the pandemics of 1918, 1957, 1968 and virulent strains of the H5N1 “bird flu” strain of influenza virus. Analogues of Replikin Scaffold sequences have since been identified in the virulent and rapidly replicating SARS coronavirus. See U.S. Published Application No. 2007/0026009.

[0020] Scaffolding of Replikin sequences homologous but not identical to the algorithm of the identified Replikin Scaffold has also been identified in P. falciparum. Replikin scaffolding in general has been related to an increase in Replikin concentrations in pathogenic genomes where it has been identified. In P. falciparum, scaffolding contributes significantly to the very high Replikin concentration noted in the proteins of the protozoa.

### Influenza

[0021] Virulent and lethal outbreaks of influenza are a continuing challenge to world health and the medical practitioner is increasingly aware of the continued threat of virulent and lethal influenza pandemics that require new methods of predicting virulence and lethality and will require new methods and compounds for treatment. Influenza is an acute respiratory illness of global importance. Despite international attempts to control influenza virus outbreaks through vaccination, influenza infections remain an important cause of morbidity and mortality. Worldwide influenza pandemics have occurred at irregular and previously unpredictable intervals throughout history and it is expected that influenza pandemics will continue to occur in the future. The impact of pandemic influenza is substantial in terms of morbidity, mortality and economic cost.

[0022] Influenza vaccines remain the most effective defense against influenza virus, but because of the ability of the virus to mutate, and the availability of non-human host reservoirs, it is expected that influenza will remain an emergent or re-emergent infection. Global influenza surveillance indicates that influenza viruses may vary within a country and between countries and continents during an influenza season. Virologic surveillance is of importance in monitoring antigenic shift and drift. Disease surveillance is also important in assessing the impact of epidemics. Both types of information have provided the basis of vaccine composition and use of antivirals. However, traditionally there has been only annual post hoc hematological classification of the increasing number of emerging influenza virus strains, and no specific chemical structure of the viruses was identified as an indicator of approaching influenza epidemic or pandemic. Until recently, the only basis for annual classification of influenza virus as active, inactive or prevalent in a given year was the activities of the virus hemagglutinin and neuraminidase proteins.

[0023] There is a need in the art for methods of predicting increases in virulence and lethality of influenza prior to outbreaks. There is likewise a need in the art for methods of preventing and treating outbreaks caused by virulent strains of influenza. Because of the annual administration of influenza vaccines and the short period of time when a vaccine can be administered, strategies directed at improving vaccine coverage are of critical importance.

### Equine Influenza Virus

[0024] Equine influenza is a common upper respiratory disease of the horse currently caused by the H3N8 strain of equine influenza virus (EIV). Typical symptoms of equine influenza include a dry hacking cough, nasal discharge, and fever. The viral disease is considered enzootic in Europe, the United States and parts of Asia. Significant outbreaks have also been observed in South America, China, and India.

[0025] The first outbreak of equine influenza in Japan since 1972 was recently reported and 2007 saw the first ever report of equine influenza in Australia. So far, no fatalities have been reported. Equine influenza is, however, sometimes fatal in young foals.

[0026] Quarantine has been thought to be the best prevention against the spread of equine influenza. South Africa, Australia and Japan have used quarantine of imported horses to stop the spread of, among other diseases, equine influenza. The quarantine practice has apparently not been fully successful suggesting possible incidental transfer of the disease through human handlers of the horses.

[0027] The influenza virus is highly mutable and, as a result, development of long-term therapies has been difficult. Vaccines generally have needed to be updated as virulent mutants of the virus have arisen. Annual review of worldwide outbreaks of the virus provides data for recommended production of vaccines against the most relevant strains of virus. Significant time elapses between identification of the most relevant strains and commercialization of vaccines.

[0028] There is a need in the art for methods of identifying emerging equine influenza viruses prior to outbreaks so that preventive measures may be taken against such emerging viruses. There is likewise a need in the art for methods of preventing and treating outbreaks caused by virulent strains of EIV including vaccines.

### Foot and Mouth Disease

[0029] Foot and Mouth Disease is a highly contagious and sometimes fatal viral disease of cattle, pigs and other animals including bovids with cloven hooves cause by foot and mouth disease virus (FMDV). FMDV is a single-stranded RNA aphthovirus of the Picornaviridae virus family. There are said to be seven different FMDV serotypes: 0, A, C, SAT-1, SAT-2, SAT-3, and Asia-1.

[0030] There is a need in the art for methods of predicting increases in virulence of FMDV prior to outbreaks of Foot and Mouth Disease. There is likewise a need in the art for methods of preventing and treating outbreaks of Food and Mouth Disease caused by virulent strains of FMDV.

### West Nile Virus

[0031] West nile virus (WNV), in a small percentage of infected humans, causes encephalitis and other serious neuroinvasive diseases. In about four percent of reported cases of WNV infection, the resulting neuroinvasive disease results in death. WNV is flaviviridae virus that was first observed in North America in 1999 and is now considered endemic in the United States. The virus is spread to humans through mosquito (and related insect) bites. Infection with WNV causes diseases such as encephalitis, meningitis and meningoencephalitis in less than about one percent of infected humans. In about 20 percent of infected humans, less severe illness, characterized by fever, headache, tiredness, aches and sometimes rashes, may occur. Of the total number of U.S. cases of WNV infection reported, about four percent have resulted in death.

[0032] WNV is a single-stranded sense RNA virus and is a member of the Japanese encephalitis virus antigenic complex, which includes several medically important viruses associated with human encephalitis: Japanese encephalitis, St. Louis encephalitis, Murray Valley encephalitis, and Kunjin encephalitis, an Australian subtype of WNV.

[0033] Since introduction of the disease to the United States in 1999, there have been more than 16,000 reported cases of WNV in humans and more than 650 reported deaths. In addition, more than 21,000 cases have been reported in horses. Currently, the only available approved strategies to combat WNV in humans are nationwide active surveillance in conjunction with mosquito control efforts and individual protection with insect repellents. There is a need in the art, therefore, for methods of predicting increases in virulence of WNV prior to epidemics. There is likewise a need in the art for methods of preventing and treating outbreaks caused by virulent strains of WNV.

### Viral Diseases in Pigs

[0034] Two severe viral diseases now endemic in swine in many countries and presently causing great economic losses worldwide are Porcine Reproductive and Respiratory Syndrome (PRRS) and Porcine Circovirus Associated Diseases (PCVAD), caused by porcine reproductive and respiratory syndrome virus (PRRSV) and porcine circovirus (PCV), respectively. Each disease has a significant impact on the hog industry and, in both diseases, current control measures are proving inadequate.

[0035] PRRS is a relatively recently recognized disease in pigs. The infectious virus is classified in the family Arteriviridae and order Nidovirales and did not have a standardized name in the past but is now known as porcine reproductive and respiratory syndrome virus (PRRSV). The disease is characterized by reproductive failure, death in young pigs and mild respiratory disease.

[0036] The pig is the only known host for PRRSV but evidence suggests that another host or hosts may have existed prior to identification of PRRS in the United States in 1987 and Europe in 1990. PRRS is now endemic in the United States and many European countries. Evidence of infection (whether serological or virological or both) has been found in Japan, Korea, the Philippines, Vietnam, South America and the Caribbean.

[0037] The disease has been associated with reproductive failure in sows and respiratory disease in all stages of pig development. Clinical signs of the disease include: fever, anorexia, depression, reduced conception rates, abortion, week piglets, respiratory distress and increased rates of other endemic diseases.

[0038] PRRSV is a positive-sense single-stranded small envelope RNA virus with at least nine open reading frames (ORFs) in its genome encoding about 20 putative proteins: ORF 1a and 1b encode replication proteins; ORF 2a and 2b encode unknown structure proteins; ORF 3, 4 and 5 encode envelope proteins; ORF 6 encodes membrane proteins and ORF 7 encodes nucleocapsid proteins.

[0039] Two types of PRRSV have been identified: European (Type I) and North American (Type II). The two types share about 60% sequence identity. PRRSV strains are known to differ markedly in pathogenicity. In 2006, highly pathogenic outbreaks of PRRSV occurred in China and Mexico. The cost of PRRSV infection to the U.S. pork industry has been estimated at between $560 million and $761 million annually. PRRSV infection has been associated with a reduction in the number of pigs weaned per litter, a reduction in birthing rate, increased mortality, reduced feed conversion and reduced average daily weight gain.

[0040] Porcine Circovirus Associated Diseases (PCVAD) have also only recently been recognized in pigs (1996). PCVAD is a term used to define the entire range of disease associated with porcine circovirus (PCV) infection. The range of disease in pigs includes: Postweaning Multisystemic Wasting Syndrome (PMWS); respiratory illness; pneumonia; diarrhea; reproductive disorders and high mortality. PCVAD symptoms may include detection of PCV within lesions that form on growing pigs, inflammation in, for example, the spleen, thymus, intestines, lymph nodes, lung, kidney, liver, and tonsils, and depletion of lymphoid cells. PCV infection is thought to pose no apparent risk to human health. PCVAD is presently severely affecting the Canadian swine industry.

[0041] Two antigenically distinct types of PCV have been identified. Porcine Circovirus 1 (PCV1), which may be non-pathogenic, and Porcine Circovirus 2 (PCV2), which appears to be the strain that causes PCVAD. PCV1 and PCV2 share about 65% amino acid identity in open reading frame 2 of the virus genome.

[0042] The incidence of PCV infection associated disease has increased by 4% between 2000 and 2006 in Canada and new outbreaks have been observed in Western Canada. In some studies, more than 80% of Canadian pigs have been found to be infected with PCV2 at slaughter. In infected herds, an increase in mortality rates has also been observed. As incidence of PCV infection has increased, pork production has decreased due to pig death and decreased productivity. Production in Canada in 2006 is expected to decrease 1.5 percent below 2005 production due to PCV-influenced disease.

[0043] There is a need in the art for methods of predicting increases in virulence of PRRSV and PCV prior to outbreaks. There is likewise a need in the art for methods of preventing and treating outbreaks caused by virulent strains of PRRSV and PCV.

### WSSV and TSV Shrimp Pathogens

[0044] White spot syndrome virus (WSSV) (also known as white spot baculoform virus) and taura syndrome virus (TSV) are global lethal pathogens in shrimp.

[0045] Taura syndrome is a viral disease in shrimp that significantly impacts the shrimp farming industry worldwide. Taura Syndrome is caused by the taura syndrome virus (TSV), which is a member of the Discistroviridae family in the genus Cripavirus that has a single positive stranded genome of about 10,000 nucleotides. The genome contains two open reading frames (ORF). ORF 1 reportedly contains coding for a helicase, a protease and an RNA-dependent RNA polymerase. ORF2 reportedly contains coding for three capsid proteins.

[0046] Taura syndrome is now considered endemic in the Americas and outbreaks have been observed in Asia. Infected shrimp generally have a red tail, are anorexic and erratic in their behavior, tail muscles may become opaque and the cuticle may become soft. Mortality rates between 5% and 95% have been observed during the acute phase of the disease. Shrimp that survive outbreaks of TSV seem to be refractory to reinfection while remaining infectious.

[0047] White spot syndrome (WSS) is a highly contagious and lethal viral infection of shrimp often destroying entire farm populations within several days of observation of the first symptoms. The first reported epidemic of the disease was in Taiwan in 1992 and the disease is now known to be present in all shrimp growing regions globally except Australia. The virus has a wide host range including most cultured penaeid shrimp including Fenneropenaeus indicus, Penaeus monodon, Litopenaeus vannamei, and Marsupenaeus japonicas, other non-penaeid shrimp, crabs, spiny lobsters and others.

[0048] WSSV is a rod-shaped double-stranded DNA virus. The complete DNA sequence of WSSV genome has reportedly been assembled into a circular sequence of 292,967 base pairs. Clinical signs of WSSV infection include white spots on the carapace, often reddish discoloration, and reduction in food consumption and loss of energy. There is a need in the art for methods of preventing and treating viral infections of shrimp such as TSV and WSSV by manipulating the replicating function of Replikin sequences and for identifying molecular targets related to the replicating function of Replikin sequences for treatment of virulent viral.

### SUMMARY OF THE INVENTION

[0049] The present invention provides a method of identifying a first virus, first organism or first malignancy with a higher lethality than at least one second virus of the same species as the first virus, second organism of the same species as the first organism or second malignancy of the same species as the first malignancy which comprises comparing the Replikin Count of the Replikin Peak Gene of the first virus, first organism or first malignancy to the Replikin Count of the Replikin Peak Gene of at least one second virus, second organism, or second malignancy to determine that the virus, organism or malignancy with the higher Replikin Count is the more lethal.

[0050] In one embodiment, the first malignancy is a lung malignancy, a brain malignancy, a breast malignancy, an ovarian malignancy or a lymph malignancy. In a specific embodiment, the first malignancy is a non-small cell lung carcinoma.

[0051] In another embodiment, the first organism is a Mycobacterium tuberculosis, Mycobaterium mucogenicum, Staphylococcus aureus, or Plasmodium falciparum.

[0052] In a further embodiment, the virus is influenza virus, foot and mouth disease virus, west nile virus, porcine respiratory and reproductive syndrome virus, porcine circovirus, white spot syndrome virus, taura syndrome virus, coronavirus, ebola virus, gemini leaf curl virus, hemorrhagic septicemia virus, or tobacco mosaic virus.

[0053] In a specific embodiment, the first virus is a strain of Influenza A virus of H1N1, H2N2, H3N2, H5N1, or H3N8.

[0054] In a further embodiment, said at least one Replikin sequence within the protein or protein fragment of the identified Replikin Peak Gene is isolated from influenza A strain H5N1 and is selected from the group consisting of SEQ ID NOS: 1685-1691, SEQ ID NOS: 1702-1717. In a further embodiment, said at least one Replikin sequence within the protein or protein fragment of the identified Replikin Peak Gene is isolated from equine influenza virus (H3N8) and is selected from the group consisting of SEQ ID NOS: 547-562.

[0055] The present invention further provides a isolated or synthesized Replikin Peak Gene of a virus, organism or malignancy wherein said Replikin Peak Gene is identified as the portion of the genome, protein or protein fragment of a virion of the virus, a cell of the organism or a malignant cell of the malignancy consisting of the highest number of continuous Replikin sequences per 100 amino acids as compared to other portions of the genome, protein or protein fragment of the virion of the virus, the cell of the organism or the malignant cell of the malignancy.

[0056] In one embodiment, the isolated or synthesized Replikin Peak Gene is the portion of a protein or protein fragment consisting of the highest number of continuous Replikin sequences per 100 amino acids as compared to all other proteins or protein fragments in the virion of the virus, in the cell of the organism or in the malignant cell of the malignancy.

[0057] In a specific embodiment, the isolated or synthesized Replikin Peak Gene is isolated from a lung malignancy, a brain malignancy, a breast malignancy, an ovarian malignancy, or a lymph malignancy. In another specific embodiment, the isolated or synthesized Replikin Peak Gene is isolated from a non-small cell lung carcinoma or glioblastoma multiforme.

[0058] In yet another embodiment, the isolated or synthesized Replikin Peak Gene of is isolated from Mycobacterium tuberculosis, Mycobacterium mucogenicum, Staphylococcus aureus, or Plasmodium falciparum.

[0059] According to a further embodiment, the isolated or synthesized Replikin Peak Gene is isolated from influenza virus, foot and mouth disease virus, west nile virus, porcine reproductive and respiratory syndrome virus, porcine circovirus, white spot syndrome virus, taura syndrome virus, coronavirus, ebola virus, gemini leaf curl virus, hemorrhagic septicemia virus, or tobacco mosaic virus.

[0060] In one embodiment, the isolated or synthesized Replikin Peak Gene is from influenza virus, particularly an Influenza A virus. In a specific embodiment, the Influenza A virus is a strain H1N1, H2N2, H3N2, H5N1 or H3N8. In another specific embodiment, the Replikin Peak Gene is isolated from the pB1 gene area of an influenza virus.

[0061] According to another embodiment, the isolated or synthesized Replikin Peak Gene is from foot and mouth disease virus. In a specific embodiment, the isolated or synthesized Replikin Peak Gene is identified within the VP1 gene of a foot and mouth disease virus.

[0062] In yet another embodiment, the isolated or synthesized Replikin Peak Gene is from a west nile virus. In a specific embodiment, the isolated or synthesized Replikin Peak Gene is isolated from the envelope protein of west nile virus.

[0063] In a further embodiment, the isolated or synthesized Replikin Peak Gene is from a porcine respiratory and reproductive syndrome virus. In a specific embodiment, the isolated or synthesized Replikin Peak Gene is isolated from a nucleocapsid protein of a porcine respiratory and reproductive syndrome virus.

[0064] In yet another embodiment, the isolated or synthesized Replikin Peak Gene is from a porcine circovirus. In a specific embodiment, the isolated or synthesized Replikin Peak Gene is isolated from a replicase protein of a porcine circovirus.

[0065] In still a further embodiment, the isolated or synthesized Replikin Peak Gene is from a white spot syndrome virus. In a specific embodiment, the isolated or synthesized Replikin Peak Gene is isolated from a ribonucleotide reductase protein of a white spot syndrome virus.

[0066] In yet another embodiment, the isolated or synthesized Replikin Peak Gene is from a tobacco mosaic virus.

[0067] In a further embodiment, the isolated or synthesized Replikin Peak Gene is from a hemorrhagic septicemia virus in fish. In a specific embodiment, the isolated or synthesized Replikin Peak Gene is isolated from a glycoprotein in a hemorrhagic septicemia virus.

[0068] In another specific embodiment, the isolated or synthesized Replikin Peak Gene comprises a sequence of SEQ ID NO: 1741, SEQ ID NO: 3664, SEQ ID NO: 3660, SEQ ID NO: 3665, SEQ ID NO: 1996, SEQ ID NO: 1665, SEQ ID NO: 1684, SEQ ID NO: 1701, SEQ ID NO: 546, SEQ ID NO: 124, SEQ ID NO: 130, SEQ ID NO: 311, SEQ ID NOS: 341-344, SEQ ID NO: 286, SEQ ID NO: 287, SEQ ID NO: 288, SEQ ID NO: 289, SEQ ID NO: 290, SEQ ID NOS: 233-238, SEQ ID NO: 415, SEQ ID NO: 421, SEQ ID NO: 438, SEQ ID NO: 451, SEQ ID NO: 462, SEQ ID NO: 498, SEQ ID NO: 669, SEQ ID NO: 1168, SEQ ID NO: 1531, SEQ ID NO: 1548, or SEQ ID NO: 1939.

[0069] The present invention further provides an immunogenic composition comprising the isolated or synthesized Replikin Peak Gene. In a specific embodiment, the immunogenic composition comprises a Replikin sequence of SEQ ID NOS: 2902-2925, SEQ ID NOS: 2312-2544, SEQ ID NOS: 2701-2711, SEQ ID NOS: 2713-2718, SEQ ID NOS: 3282-3285, 3287-3291, 3293, 3295, 3297, 3299, 3300, 3302, 3304, 3306, and 3308, SEQ ID NOS: 1685-1691, SEQ ID NOS: 1702-1717, SEQ ID NO: 106, SEQ ID NO: 112, SEQ ID NO: 113, SEQ ID NOS: 125-129, SEQ ID NOS: 131-156, SEQ ID NOS: 233-244, SEQ ID NOS: 286-290, SEQ ID NOS: 312-323, SEQ ID NOS: 354-366, SEQ ID NOS: 368-380, SEQ ID NOS: 383-393, SEQ ID NOS: 395-401, SEQ ID NOS: 403-414, SEQ ID NOS: 291-307, SEQ ID NOS: 308-310, SEQ ID NOS: 324-327, SEQ ID NOS: 328-340, SEQ ID NOS: 416-419, SEQ ID NOS: 422-437, SEQ ID NOS: 440-445, SEQ ID NOS: 452-457, SEQ ID NOS: 464-476, SEQ ID NOS: 482-484 and SEQ ID NOS: 487-492, SEQ ID NOS: 547-562. SEQ ID NOS: 663-667, SEQ ID NOS: 670-1166, SEQ ID NOS: 1169-1529, SEQ ID NOS: 1532-1542, SEQ ID NO: 1548, SEQ ID NOS: 3788-3823), or SEQ ID NOS 1637-1663.

[0070] A non-limiting embodiment of the present invention provides computer readable medium having stored thereon instructions which, when executed, cause the processor to perform a method for identifying a Replikin Peak Gene of a virus, organism or malignancy comprising identifying, within amino acid sequences or nucleic acid sequences that encode amino acid sequences of said virus, organism or malignancy, the portion of the genome, or protein or protein fragment of said virus, said organism or said malignancy consisting of the highest number of continuous Replikin sequences per 100 amino acids as compared to other portions of the genome, or protein or protein fragment of the malignancy, organism or virus.

[0071] In one embodiment, the computer readable medium comprises instructions which, when executed, cause the processor to perform a method for predicting an increase in lethality or virulence of said virus, organism or malignancy that comprises said identified Replikin Peak Gene or an outbreak of said virus or organism that comprises said identified Replikin Peak Gene by: (1) determining that the Replikin Count of said Replikin Peak Gene or that the Replikin Count of a protein or gene area comprising said Replikin Peak Gene is higher than another Replikin Peak Gene or a protein or gene area comprising said other Replikin Peak Gene identified within the genome or within a protein or protein fragment of at least one other virus of the same species as said virus, at least one other organism of the same species as said organism or at least one other malignancy of the same type as said malignancy wherein said other virus, said other organism or said other malignancy is isolated at an earlier time point than said virus, said organism or said malignancy, and (2) predicting an increase in lethality or virulence of said virus, organism or malignancy or predicting an outbreak of said virus or organsism.

[0072] The invention also provides a method of predicting the strain, the host or the geographic region of an outbreak or increase in lethality or virulence of a virus or organism by (1) identifying a Replikin Peak Gene or a protein or gene area comprising a Replikin Peak Gene within the genome of a first virus or organism of a first strain, from a first host, or isolated from a first geographic region or within a protein or protein fragment of the first virus or organism that has a higher Replikin Count than a Replikin Peak Gene or protein or gene area comprising a Replikin Peak Gene identified within the genome or within a protein or protein fragment of at least one second virus of the same species as the first virus or at least one second organism of the same species as the first organism wherein said first virus or said first organism is isolated at a later time point than said first virus or said first organism and is the same strain, from the same or another host or isolated from the same or another geographic region as the first virus or first organism, and (2) predicting an outbreak or an increase in lethality or virulence of said first strain, in said first host or within said first geographic region of said first virus or organism.

[0073] In one embodiment, the protein or gene area comprising said Replikin Peak Gene within the genome of a first virus or organism is identified as having a higher Replikin Count than said protein or gene area comprising a Replikin Peak Gene identified within the genome or within a protein or protein fragment of said at least one second virus or organism.

[0074] In another embodiment, the first virus or first organism is isolated at least six months to three years later than the second organism or said second virus. In a specific embodiment, the first organism or first virus is Mycobacterium tuberculosis, Mycobaterium mucogenicum, Staphylococcus aureus, and Plasmodium falciparum, influenza virus, foot and mouth disease virus, west nile virus, porcine reproductive and respiratory syndrome virus, porcine circovirus, white spot syndrome virus, taura syndrome virus, coronavirus, ebola virus, gemini leaf curl virus in tomato plants, hemorrhagic septicemia virus, or tobacco mosaic virus. In another embodiment, the Staphylococcus aureus is methicillin-resistant.

[0075] In a further embodiment, the influenza virus a strain of Influenza A virus. In a specific embodiment, the first virus is an influenza virus of the strain H1N1, H2N2, H3N2, H5N1 or H3N8.

[0076] In a further embodiment of the invention, the protein or gene area comprising the Replikin Peak Gene is the pB1 gene area of the influenza virus.

[0077] In yet another embodiment, the protein or gene area is a nucleocapsid protein of porcine respiratory and reproductive syndrome virus.

[0078] In a further embodiment, the protein or gene area is an envelope protein of west nile virus.

[0079] In a further embodiment, the protein or gene area is a VP1 protein of foot and mouth disease virus.

[0080] In still another embodiment, the protein or gene area is an ATP-ase of Plasmodium falciparum.

[0081] In yet a further embodiment, the protein or gene area is a replicase protein of porcine circovirus.

[0082] In another embodiment, the protein or gene area is a ribonucleotidease of said white spot syndrome virus.

[0083] The present invention further provides a method of identifying a first virus, organism or malignancy associated with higher lethality, higher virulence or more rapid replication than a second virus of the same species as the first virus, a second organism of the same species as the first organism or a second malignancy of the same type as the first malignancy comprising identifying a Replikin Peak Gene encoded within the genome of at least one virion of the first virus, or at least one cell of the first organism, or at least one malignant cell of the first malignancy, or within a protein or protein fragment of at least one virion of the first virus, or at least one cell of the first organism, or at least one malignant cell of the first malignancy that has a higher Replikin Count than a Replikin Peak Gene identified encoded within the genome of at least one virion of the second virus, or at least one cell of the second organism, or at least one malignant cell of the second malignancy or within a protein or protein fragment of at least one virion of the second virus, or at least one cell of the second organism, or at least one malignant cell of the second malignancy wherein said first virus, first organism or first malignancy has higher lethality, higher virulence or more rapid replication than said second virus, second organism or second malignancy, and wherein the Replikin Peak Gene is defined as a protein or protein fragment having the highest concentration of continuous Replikin sequences per 100 amino acids as compared to the remaining proteins or protein fragments in the same virion of the virus, the same cell of the organism, or the same malignant cell, or the portion of the genome encoding the protein or protein fragment.

[0084] Further provided is a method of identifying a first virus, first organism or first malignancy with a higher lethality than at least one second virus of the same species as the first virus, second organism of the same species as the first organism or second malignancy of the same species as the first malignancy comprising comparing the Replikin Count of the whole genome of a virus, organism or malignancy to the Replikin Count of the whole genome of at least one second virus, second organism, or second malignancy to determine that the virus, organism or malignancy with the higher Replikin Count is the more lethal.

[0085] According to a specific embodiment, the first virus is a coronavirus, a foot and mouth disease virus, a white spot syndrome virus, a taura syndrome virus, a porcine circovirus, or an influenza virus.

[0086] In one specific embodiment, the first virus is an H5N1 strain of influenza virus.

[0087] In another specific embodiment, the influenza virus is an Influenza A virus. In a further specific embodiment, the Influenza A virus is H1N1, H2N2, H3N2, H5N1 or H3N8.

[0088] According to another embodiment, the Replikin Peak Gene is isolated from the pB1 gene area of an influenza virus.

[0089] The present invention also provides method for obtaining an isolated or synthesized Replikin Peak Gene of a virus, organism or malignancy for diagnosis, prevention or treatment of an infection of said virus or said organism or for diagnosis, prevention or treatment of said malignancy comprising: (1) obtaining a plurality of isolates of virus of the same species, a plurality of organisms of the same species, or a plurality of malignancies of the same type; (2) analyzing the protein sequences or protein sequence fragments of each individual isolate of the plurality of isolates of virus, a cell of each individual organism of the plurality of organisms, or a malignant cell of each individual malignancy of the plurality of malignancies for the presence and concentration of Replikin sequences; (3) identifying the protein sequence or the protein sequence fragment having the highest concentration of continuous Replikin sequences in the malignant cell of each individual malignancy, the cell of each individual organism or each individual virus isolate; (4) selecting the protein sequence or protein sequence fragment having the highest concentration of continuous Replikin sequences among the plurality of isolates of virus, the plurality of organisms, or the plurality of malignancies; (5) identifying the amino acid sequence of the selected protein sequence or protein sequence fragment as the Replikin Peak Gene of the plurality of virus isolates, organisms or malignancies; and (6) isolating or synthesizing the identified Replikin Peak Gene of at least one of the plurality of virus isolates, organisms or malignancies wherein the isolated or synthesized identified Replikin Peak Gene is useful for diagnosis, prevention or treatment of said infection of said virus or said organism or said malignancy.

[0090] Further provided is an immunogenic composition comprising at least one isolated or synthesized Replikin Peak Gene isolated according to the above method. In a specific embodiment, the immunogenic composition is isolated from an emerging strain of a virus or organism, and optionally further comprises a pharmaceutically acceptable carrier.

[0091] The present invention also provides a vaccine comprising at least one isolated or synthesized Replikin Peak Gene. In a specific embodiment, the vaccine comprises a Replikin Peak Gene isolated from an emerging strain of virus or organism. In another specific embodiment, the vaccine comprises SEQ ID NO: 1741, SEQ ID NO: 3664, SEQ ID NO: 3660, SEQ ID NO: 3665, SEQ ID NO: 1996, SEQ ID NO: 1665, SEQ ID NO: 1684, SEQ ID NO: 1701, SEQ ID NO: 546, SEQ ID NO: 124, SEQ ID NO: 130, SEQ ID NO: 311, SEQ ID NOS: 341-344, SEQ ID NO: 286, SEQ ID NO: 287, SEQ ID NO: 288, SEQ ID NO: 289, SEQ ID NO: 290, SEQ ID NOS: 233-238, SEQ ID NO: 415, SEQ ID NO: 421, SEQ ID NO: 438, SEQ ID NO: 451, SEQ ID NO: 462, SEQ ID NO: 498, SEQ ID NO: 669, SEQ ID NO: 1168, SEQ ID NO: 1531, SEQ ID NO: 1548, positions 81-204 of SEQ ID NO: 3787, or SEQ ID NO: 1939.

[0092] In yet a further embodiment, the vaccine comprises a Replikin Peak Gene isolated from a virus.

[0093] In a specific embodiment, the virus is influenza virus, foot and mouth disease virus, west nile virus, porcine reproductive and respiratory syndrome virus, porcine circovirus, white spot syndrome virus, taura syndrome virus, coronavirus, ebola virus, gemini leaf curl virus, hemorrhagic septicemia virus, or tobacco mosaic virus.

[0094] In one embodiment, the Replikin Peak Gene in the vaccine is isolated from Influenza A, or specifically strains H1N1, H2N2, H3N2, H5N1 or H3N8.

[0095] In another embodiment, the vaccine comprises a Replikin Peak Gene isolated from an organism.

[0096] In a further embodiment, Replikin Peak Gene is isolated from Mycobacterium tuberculosis, Mycobaterium mucogenicum, Staphylococcus aureus, or Plasmodium falciparum. In a specific embodiment, the Staphylococcus aureus is methicillin-resistant.

[0097] In still another embodiment, the Replikin Peak Gene is isolated from a malignancy.

[0098] In a specific embodiment, the Replikin Peak Gene is isolated from a lung malignancy, a brain malignancy, a breast malignancy or a lymph malignancy. In another embodiment, the Replikin Peak Gene is isolated from a non-small cell lung carcinoma. In a further embodiment, the Replikin Peak Gene is isolated from glioblastoma multiforme.

[0099] The present invention further provides an immunogenic composition comprising a Replikin Peak Gene, optionally in combination with a pharmaceutically acceptable carrier. In one embodiment, the immunogenic composition comprises SEQ ID NO: 1741, SEQ ID NO: 3664, SEQ ID NO: 3660, SEQ ID NO: 3665, SEQ ID NO: 1996, SEQ ID NO: 1665, SEQ ID NO: 1684, SEQ ID NO: 1701, SEQ ID NO: 546, SEQ ID NO: 124, SEQ ID NO: 130, SEQ ID NO: 311, SEQ ID NOS: 341-344, SEQ ID NO: 286, SEQ ID NO: 287, SEQ ID NO: 288, SEQ ID NO: 289, SEQ ID NO: 290, SEQ ID NOS: 233-238, SEQ ID NO: 415, SEQ ID NO: 421, SEQ ID NO: 438, SEQ ID NO: 451, SEQ ID NO: 462, SEQ ID NO: 498, SEQ ID NO: 669, SEQ ID NO: 1168, SEQ ID NO: 1531, SEQ ID NO: 1548, or SEQ ID NO: 1939.

[0100] The present invention further provides an isolated or synthesized Replikin sequence isolated from a protein or protein fragment a Replikin Peak Gene or isolated from a protein comprising a Replikin Peak Gene.

[0101] In one embodiment, the Replikin sequence is from a Replikin Peak Gene isolated from Mycobacterium tuberculosis, Mycobacterium mucogenicum, Staphylococcus aureus, or a Plasmodium falciparum. In a specific embodiment, the Replikin sequence is from a Replikin Peak Gene isolated from Mycobacterium mucogenicum. In a further embodiment, the Replikin Peak Gene is SEQ ID NOS: 2902-2925. In another specific embodiment, the Replikin sequence is from a Replikin Peak Gene isolated from Plasmodium falciparum. In a further embodiment, the Replikin Peak Gene is one of SEQ ID NOS: 2312-2544, SEQ ID NOS: 2701-2711, SEQ ID NOS: 2713-2718, SEQ ID NOS: 3282-3285, 3287-3291, 3293, 3295, 3297, 3299, 3300, 3302, 3304, 3306, or SEQ ID NO: 3308.

[0102] In another embodiment, the Replikin sequence is from a Replikin Peak Gene isolated from influenza virus, foot and mouth disease virus, west nile virus, porcine reproductive and respiratory syndrome virus, porcine circovirus, white spot syndrome virus, taura syndrome virus, coronavirus, ebola virus, gemini leaf curl virus, hemorrhagic septicemia virus, or tobacco mosaic virus.

[0103] In a specific embodiment, the influenza virus is Influenza A virus. In another specific embodiment, the Influenza A virus is H1N1, H2N2, H3N2, H5N1 or H3N8. In a further specific embodiment, the Influenza A virus is H5N1 and the Replikin sequence is one of SEQ ID NOS: 1685-1691, SEQ ID NOS: 1702-1716 or SEQ ID NO: 1717. In a further specific embodiment, the Influenza A virus is H3N8 and the Replikin sequence is one of SEQ ID NOS: 547-561 or SEQ ID NO: 562.

[0104] In another embodiment, the Replikin sequence is from a Replikin Peak Gene isolated from foot and mouth disease virus. In a specific embodiment, the Replikin sequence from the foot and mouth disease virus is one of SEQ ID NO: 106, SEQ ID NO: 112, SEQ ID NO: 113, SEQ ID NOS: 125-129, SEQ ID NOS: 131-155 or SEQ ID NO: 156.

[0105] In still another embodiment, the Replikin sequence is from a Replikin Peak Gene isolated from west nile virus. In a specific embodiment, the Replikin sequence from the west nile virus is one of SEQ ID NOS: 233-243 or SEQ ID NO: 244.

[0106] In a further embodiment, the Replikin sequence is from a Replikin Peak Gene isolated from porcine reproductive and respiratory virus. In a specific embodiment, the Replikin sequence from porcine reproductive and respiratory virus is one of SEQ ID NOS: 286-290, SEQ ID NOS: 312-323, SEQ ID NOS: 354-366, SEQ ID NOS: 368-380, SEQ ID NOS: 383-393, SEQ ID NOS: 395-401, SEQ ID NOS: 403-413 or SEQ ID NO: 414.

[0107] In another embodiment, the Replikin sequence is from a Replikin Peak Gene isolated from porcine circovirus. In a specific embodiment, the Replikin sequence from porcine circovirus is one of SEQ ID NOS: 291-307, SEQ ID NOS: 308-310, SEQ ID NOS: 324-327, SEQ ID NOS: 328-340, SEQ ID NOS: 416-419, SEQ ID NOS: 422-437, SEQ ID NOS: 440-445, SEQ ID NOS: 452-457, SEQ ID NOS: 464-476, SEQ ID NOS: 482-484, SEQ ID NOS: 487-491 or SEQ ID NO: 492.

[0108] In still a further embodiment, the Replikin sequence is from a Replikin Peak Gene isolated from white spot syndrome virus. In a specific embodiment, the Replikin sequence from white spot syndrome virus is one of SEQ ID NOS: 663-667, SEQ ID NOS: 670-1166, SEQ ID NOS: 1169-1529, SEQ ID NOS: 1532-1542 and SEQ ID NO: 1548.

[0109] According to the present invention provided is a vaccine for prevention and/or treatment of an viral or organismal infection or a malignancy wherein the vaccine comprises at least one isolated or synthesized Replikin sequence within a protein or protein fragment of a Replikin Peak Gene or a protein comprising a Replikin Peak Gene identified in said virus, organism, or malignancy.

[0110] In a further embodiment, the at least one isolate or synthesized Replikin sequence in the vaccine is one of SEQ ID NOS: 2902-2925, SEQ ID NOS: 2312-2544, SEQ ID NOS: 2701-2711, 2713-2718, SEQ ID NOS: 3282-3285, 3287-3291, 3293, 3295, 3297, 3299, 3300, 3302, 3304, 3306, 3308, SEQ ID NOS: 1685-1691, SEQ ID NOS: 1702-1717, SEQ ID NOS: 547-562, SEQ ID NO: 106, SEQ ID NO: 112, SEQ ID NO: 113, SEQ ID NOS: 125-129, and SEQ ID NOS: 131-156, SEQ ID NOS: 233-244, SEQ ID NOS: 286-290, SEQ ID NOS: 312-323, SEQ ID NOS: 354-366, SEQ ID NOS: 368-380, SEQ ID NOS: 383-393, SEQ ID NOS: 395-401, SEQ ID NOS: 403-414, SEQ ID NOS: 291-307, SEQ ID NOS: 308-310, SEQ ID NOS: 324-327, SEQ ID NOS: 328-340, SEQ ID NOS: 416-419, SEQ ID NOS: 422-437, SEQ ID NOS: 440-445, SEQ ID NOS: 452-457, SEQ ID NOS: 464-476, SEQ ID NOS: 482-484 SEQ ID NOS: 487-492, SEQ ID NOS: 663-667, SEQ ID NOS: 670-1166, SEQ ID NOS: 1169-1529, SEQ ID NOS: 1532-1542, SEQ ID NO: 1548, SEQ ID NOS: 1637-1662, or SEQ ID NO: 1663.

[0111] In one embodiment, the vaccine is for prevention and/or treatment of a viral infection. In a specific embodiment, the vaccine is for a viral infection is caused by influenza virus, foot and mouth disease virus, west nile virus, porcine reproductive and respiratory syndrome virus, porcine circovirus, white spot syndrome virus, taura syndrome virus, coronavirus, ebola virus, gemini leaf curl virus, hemorrhagic septicemia virus, or tobacco mosaic virus.

[0112] In another specific embodiment, the influenza virus is Influenza A virus. In a further specific embodiment, the Influenza A virus is H1N1, H2N2, H3N2, H5N1 or H3N8 Influenza A virus.

[0113] In another specific embodiment, the virus is hemorrhagic septicemia virus.

[0114] In another embodiment, the vaccine is for prevention and/or treatment of an organismal infection.

[0115] In one specific embodiment, the organismal infection is caused by Mycobaterium mucogenicum, Mycobacterium tuberculosis, Staphylococcus aureus, or Plasmodium falciparum. In a further specific embodiment, the Staphylococcus aureus is methicillin-resistant.

[0116] In another embodiment, the vaccine is for prevention of a malignancy.

[0117] In one specific embodiment, the malignancy is a lung malignancy, a brain malignancy, a breast malignancy, an ovarian malignancy, or a lymph malignancy. In a further specific embodiment, the malignancy is non-small cell lung carcinoma or glioblastoma multiforme.

[0118] The invention also provides an immunogenic compound comprising at least one isolated or synthesized Replikin sequence within the protein or protein fragment of a Replikin Peak Gene or within a protein comprising a Replikin Peak Gene wherein said Replikin Peak Gene is identified in a virus, an organism or a malignancy, optionally further comprising a pharmaceutically acceptable carrier.

[0119] In another aspect, the present invention provides a method of stimulating the immune system, comprising administering in an animal at least one isolated or synthesized Replikin sequence identified within a protein or protein fragment of a Replikin Peak Gene or within a protein or gene area comprising a Replikin Peak Gene identified in a virus, organism, or malignancy. In a specific embodiment, the animal is a human.

[0120] The invention further provides an antibody to at least one isolated or synthesized Replikin sequence within a protein or protein fragment of Replikin Peak Gene or within protein or gene area comprising a Replikin Peak Gene.

[0121] Also provided by the present invention is a method of identifying a lethal strain of malignancy, organism or virus comprising: (1) obtaining a plurality of isolates of said malignancy, organism or virus; (2) identifying the Replikin Peak Gene in each isolate of the plurality of isolates of said malignancy, organism or virus; (3) analyzing the amino acid sequence of a protein or protein fragment of the Replikin Peak Gene of each isolate of the plurality of isolates for the presence and concentration of Replikin sequences; (4) comparing the concentrations of Replikin sequences in each of the proteins or protein fragments of the Replikin Peak Gene of each isolate of the plurality of isolates to the concentration of Replikin sequences in each of the proteins or protein fragments of the Replikin Peak Gene of each of the other isolates of the plurality of isolates; and (5) identifying the isolate having the highest concentration of continuous Replikin sequences in the protein or protein fragment of the Replikin Peak Gene as a virulent or lethal strain of said malignancy, organism or virus.

[0122] Further provided is a method of selecting a peptide from a malignancy, organism or virus for inclusion in a preventive or therapeutic vaccine or immunogenic compound for a malignancy, organism or virus comprising identifying at least one difference in the amino acid sequence of an otherwise conserved Replikin sequence or Replikin Peak Gene between at least two isolates of said malignancy, organism or virus and correlating the identified at least one difference in the amino acid sequence with the highest virulence, morbidity or host mortality among the at least two isolates and selecting an otherwise conserved Replikin sequence, Replikin Peak Gene or Replikin sequence within a Replikin Peak Gene having the identified at least one amino acid sequence difference as the peptide for inclusion in a preventive or therapeutic vaccine or immunogenic compound.

[0123] In one embodiment, the method further comprises predicting the isolate comprising the selected conserved Replikin sequence or Replikin Peak Gene having the at least one difference in the amino acid sequence to be lethal isolate of said malignancy, organism or virus.

[0124] In a specific embodiment, the malignancy, organism or virus is a malignancy.

[0125] In another specific embodiment, the malignancy is a lung malignancy, a brain malignancy, a breast malignancy or a lymph malignancy. In a further specific embodiment, the malignancy is a non-small cell lung carcinoma or a glioblastoma multiforme.

[0126] In another aspect, the malignancy, organism or virus is an organism.

[0127] In a first specific embodiment, the organism is Mycobacterium tuberculosis, Mycobaterium mucogenicum, Staphylococcus aureus, or Plasmodium falciparum. In another specific embodiment, the Staphylococcus aureus is methicillin-resistant.

[0128] In another aspect, the malignancy, organism or virus is a virus.

[0129] In one specific embodiment, the virus is influenza virus, foot and mouth disease virus, west nile virus, porcine reproductive and respiratory syndrome virus, porcine circovirus, white spot syndrome virus, taura syndrome virus, coronavirus, ebola virus, gemini leaf curl virus, hemorrhagic septicemia virus or tobacco mosaic virus.

[0130] The invention further provides a method of determining a source of a case of lung malignancy comprising identifying at least one peptide in a Replikin Peak Gene of a lung cancer cell that is also present in a Replikin Peak Gene of an isolate of tobacco mosaic virus, wherein the peptide is involved with the source of the lung malignancy.

[0131] In one embodiment, a plurality of peptides is identified in the Replikin Peak Gene of the lung cancer cell wherein each one of the plurality of peptides is also identified in the Replikin Peak Gene of an isolate of tobacco mosaic virus.

[0132] In another embodiment, the at least one peptide in the Replikin Peak Gene of the lung cancer cell and the at least one peptide in Replikin Peak Gene of the isolate of tobacco mosaic virus is a peptide of about 10 amino acids or less comprising at least two lysines and at least one histidine.

[0133] In a further embodiment, the at least one peptide in the Replikin Peak Gene of the lung cancer cell and the at least one peptide in Replikin Peak Gene of the isolate of tobacco mosaic virus is a peptide of about 10 amino acids or less comprising at least three lysines and at least one histidine.

[0134] In yet another embodiment, the at least one peptide in the Replikin Peak Gene of the lung cancer cell and the at least one peptide in the Replikin Peak Gene of the isolate of tobacco mosaic virus is about 7 amino acids or less comprising at least three lysines and at least one histidine.

[0135] In a further embodiment, the at least one peptide in the Replikin Peak Gene of the lung cancer cell and the at least one peptide in the Replikin Peak Gene of the isolate of tobacco mosaic virus is about 4 amino acids comprising three lysines and one histidine.

[0136] In a specific embodiment, the at least one peptide in the Replikin Peak Gene of the lung cancer cell and in the Replikin Peak Gene of the isolate of tobacco mosaic virus is KHKK (SEQ ID NO: 1584).

[0137] In another embodiment, the more than one KRKK (SEQ ID NO: 1584) peptide is identified in the Replikin Peak Gene of the lung cancer cell and in the Replikin Peak Gene of the isolate of tobacco mosaic virus.

[0138] In one specific embodiment, at least 10 KHKK (SEQ ID NO: 1584) peptides are identified in the Replikin Peak Gene of the lung cancer cell and at least 10 KHKK (SEQ ID NO: 1584) peptides are identified in the Replikin Peak Gene of the isolate of tobacco mosaic virus.

[0139] In another specific embodiment, at least 20 KHKK (SEQ ID NO: 1584) peptides are identified in the Replikin Peak Gene of the lung cancer cell and at least 20 KHKK (SEQ ID NO: 1584) peptides are identified in the Replikin Peak Gene of the isolate of tobacco mosaic virus.

[0140] In a third specific embodiment, at least 30 KHKK (SEQ ID NO: 1584) peptides are identified in the Replikin Peak Gene of the lung cancer cell and at least 30 KHKK (SEQ ID NO: 1584) peptides are identified in the Replikin Peak Gene of the isolate of tobacco mosaic virus.

[0141] In a fourth specific embodiment, at least 50 KHKK (SEQ ID NO: 1584) peptides are identified in the Replikin Peak Gene of the lung cancer cell and at least 50 KHKK (SEQ ID NO: 1584) peptides are identified in the Replikin Peak Gene of the isolate of tobacco mosaic virus.

[0142] The present invention further provides a method of identifying a first case of malignancy of the lung having a higher rate of replication, aggressive growth pattern or lethality as compared with a second case of malignancy of the lung comprising identifying a Replikin Peak Gene in a malignant cell from a first case of malignancy of the lung that has a higher Replikin Count in the Replikin Peak Gene than a Replikin Peak Gene identified in a malignant cell from a second case of malignancy of the lung.

[0143] In one embodiment, first and second cases of malignancy of the lung are non-small cell lung malignancies.

[0144] Further provided is an isolated or synthesized Replikin Peak Gene in a lung malignancy for diagnosis, prevention or treatment of lung cancer by the method comprising: (1) obtaining at least one malignant cell from a lung malignancy; (2) analyzing the protein sequences or protein sequence fragments of the at least one malignant cell for the presence and concentration of Replikin sequences; (3) identifying the protein sequence or the protein sequence fragment having the highest concentration of continuous Replikin sequences in the at least one malignant cell; (4) selecting the protein sequence or protein sequence fragment having the highest concentration of continuous Replikin sequences; (5) identifying the amino acid sequence of the selected protein sequence or protein sequence fragment as the Replikin Peak Gene; and (6) isolating or synthesizing the identified Replikin Peak Gene of the at least one malignant cell, wherein the isolated or synthesized identified Replikin Peak Gene is useful for diagnosis, prevention or treatment of lung cancer.

[0145] In one aspect, the lung malignancy is a non-small cell lung malignancy.

[0146] In another aspect, at least one isolated or synthesized Replikin sequence within the protein or protein fragment of the identified Replikin Peak Gene for diagnosis, prevention or treatment of lung cancer.

[0147] In a specific embodiment, the at least one isolated or synthesized Replikin sequence within the protein or protein fragment of the identified Replikin Peak Gene is one of SEQ ID NOS: 1585-1635 of SEQ ID NO: 1636.

[0148] The invention also provides an immunogenic composition for prevention and treatment of lung cancer, wherein the immunogenic composition comprises at least one isolated or synthesized Replikin sequence within the protein or protein fragment of the identified Replikin Peak Gene.

[0149] Also provided is method of stimulating the immune system, comprising administering in an animal the at least one isolated or synthesized Replikin sequence identified within the Replikin Peak Gene of the lung malignancy for prevention, treatment or diagnosis of lung cancer in an animal. In a specific embodiment, the animal is a human.

[0150] In another embodiment, the present invention provides a method of identification of a lethal form of lung cancer comprising: (1) obtaining at least one malignant cell from a plurality of lung tumors; (2) identifying the Replikin Peak Gene in the at least one malignant cell of each of the plurality of lung tumors; (3) analyzing the amino acid sequence of a protein or protein fragment of the Replikin Peak Gene in the at least one malignant cell of each of the plurality of lung tumors for the presence and concentration of Replikin sequences; (4) comparing the concentrations of Replikin sequences in each of the proteins or protein fragments of the Replikin Peak Gene in the at least one malignant cell of each of the plurality of lung tumors; and (5) identifying the lung tumor having the highest concentration of continuous Replikin sequences in the protein or protein fragment of the Replikin Peak Gene as a lethal form of lung cancer.

[0151] In a further embodiment, the present invention provides a method of identification of a more lethal form of lung cancer among at least two lung cancers, comprising: (1) obtaining at least one malignant cell from each of at least two lung cancers; (2) identifying the Replikin Peak Gene in the at least one malignant cell of each of the at least two lung cancers; (3) analyzing the amino acid sequence of a protein or protein fragment of the Replikin Peak Gene in the at least one malignant cell of each of the at least two lung cancers for the presence and concentration of Replikin sequences; (4) comparing the concentrations of Replikin sequences in each of the proteins or protein fragments of the Replikin Peak Gene in the at least one malignant cell of each of the at least two lung cancers; and (5) identifying the lung cancer having the highest concentration of continuous Replikin sequences in the protein or protein fragment of the Replikin Peak Gene as the more lethal form of lung cancer.

[0152] The invention further provides a method of determining an expected increase in lethality or virulence of a virus or organism which method comprises: (1) obtaining a plurality of isolates of said virus or organism wherein each isolate is isolated within a known time period and wherein at least two of said isolates is isolated about six months to about 5 years later than at least two other of said isolates; (2) identifying a Replikin Peak Gene in each isolate of said plurality of isolates; (3) analyzing the identified Replikin Peak Gene of each isolate of the plurality of isolates to determine the Replikin Count of each Replikin Peak Gene of each isolate of the plurality of isolates, or analyzing a protein, protein fragment, or gene area comprising the identified Replikin Peak Gene of each isolate of the plurality of isolates to determine the Replikin Count of the protein, protein fragment, or gene area of the plurality of isolates; (4) determining a mean Replikin Count within the Replikin Peak Gene or within the protein, protein fragment, or gene area comprising said identified Replikin Peak Gene for each known time period; (5) comparing the mean Replikin Count within the Replikin Peak Gene or within the protein, protein fragment, or gene area for each known time period one to another; (6) identifying an increase in the mean Replikin Count between at least two known time periods; and (7) identifying an expected increase in lethality or virulence of said virus, or organism within about six months to about three years following said identified increase in the mean Replikin Count.

[0153] In one specific embodiment, the known time period is about 1 year. In another specific embodiment, the increase in mean Replikin Count occurs over one year. In a further specific embodiment, the increase in mean Replikin Count occurs over three years. In another embodiment, the increase in mean Replikin Count is significant between at least two known time periods. In a further embodiment, the increase in mean Replikin Count has a significance of p=<0.001.

### BRIEF DESCRIPTION OF THE DRAWINGS

[0154] FIG. 1 illustrates the localization of the pB1 gene area as the Replikin Peak Gene in the genome of the H5N1 strain of influenza virus. Replikin Peak Genes are the places in the genome where Replikin sequences are continuous and most concentrated. The pB1 gene area comprises a Replikin Peak Gene in the H5N1 genome and the Replikin Count of the pB1 gene area correlates increases in virulence and mortality. Dark gray columns represent mean Replikin Counts for designated gene areas in isolates of H5N1 virus isolated during the given year. Light gray columns represent standard deviation from the mean in the population of isolates in a given year. Standard deviation of the means is shown in light gray columns on top of the means, rather than in the usual ‘T’ symbols. This style is used to emphasize the diverse expanding virus population with regard to the Replikin Count. Replikin Counts for isolates of H5N1 virus isolated in years 2003 through 2006 with genetic information publicly available at pubmed.com were determined separately by analysis of the number of Replikin sequences observed in each of the eight genome areas of human H5N1 influenza virus for isolates in a given year. The eight genome areas that have been identified are nucleocapsid, matrix, pB2, neuraminidase, pA, NS, hemagglutinin, and pB1 gene areas.

[0155] FIG. 2 illustrates an increase in Replikin Count before and accompanying each influenza A pandemic and outbreak since 1918 and low Replikin Counts during quiescent periods of influenza A infection and continually in non-lethal Influenza B. The graph provides annual Replikin Counts from 1917-2007 for all Replikin Peak Genes isolated in silico in the pB1 gene area of influenza strains having amino acid or nucleic acid sequences publicly available at PubMed. Data is provided (1) for non-lethal human Influenza B between 1940 and 2007 (thick dashed medium gray line) and (2) for both the lethal and non-lethal periods of human Influenza A viruses between 1917 and 2007. Human Influenza A strains are (1) H1N1 (thick medium gray line), (2) H2N2 (thin light gray line), (3) H3N2 (thin medium gray line), and (4) H5N1 (thin black line grey). H5N1 strains isolated from chicken are illustrated by a thick medium gray line. The total number of sequences analyzed for the data (N) is 14,227. Listed pandemics, epidemics and outbreaks are the 1918 H1N1 pandemic, the 1930's H1N1 epidemic, the 1957H2N2 pandemic, the 1968H3N1 pandemic, the 1977-78H3N2 outbreaks and the H5N1 outbreaks of 1997, 2001-2004 and 2007. Over a ninety year period, pandemics, epidemics and outbreaks are associated with Replikin Counts of four or above in the RPG of influenza strains. Over the same period constant low Replikin Counts of less than four may be observed during quiescent non-lethal periods of influenza A infections and low Replikin Counts of less than four may be observed in non-lethal Influenza B.

[0156] FIG. 3 illustrates successive “emerging” strains of influenza virus between 1930 and 2007. Mean Replikin Counts per year of isolation of various strains of influenza are provided for the polymerase area (marked with circles), the pB1 area (marked with triangles), and the pB1-F2 area (marked with squares). Data for H1N1 and H3N2 continue through 2007. Gaps represent years where no data was available for these genomic areas on PubMed. Dramatic increases in Replikin Count may be observed just before outbreak in the rebound epidemic of H1N1 beginning in the 1930's, in the pandemics of H2N2 and H2N3, which occurred in 1957 and 1968, respectively, and the outbreaks of H5N1 between 1997 and 2007. The largest increase in Replikin Count may be observed in the pB1-F2 area of the genome, which is contained within the pB1 area of the genome. The next largest increase in Replikin Count may be observed in the pB1 area of the genome, which is contained in the polymerase area of the genome. The smallest increase in Replikin Count may be observed in the polymerase area of the genome. It may be observed, therefore, that the Replikin Count becomes magnified as measured within the pB1 area as compared to the polymerase area and within the pB1-F2 area as compared to the pB1 area.

[0157] FIG. 4 illustrates the relationship of Replikin Count of the Replikin Peak Gene pB1 gene area in human H5N1 to percent human mortality between 2003 and 2007 in human cases of H5N1 infection. An increase in Replikin Count in the pB1 gene area of H5N1 is observed to be quantitatively related to higher mortality in the host. In the graph, (1) light gray represents the mean Replikin Count of whole virus isolates at a given year, (2) medium gray represents the mean Replikin Count in the pB1 area of publicly available sequences of isolates of human H5N1 at a given year, (3) the colorless bars represent the standard deviation from the mean of Replikin Count in a given year, and (4) black represents ten times the percent mortality of identified human cases of H5N1 infection in the given year.

[0158] FIG. 5 illustrates a 2005 through 2007 upregulation of human H5N1 in humans as compared to H5N1 in goose, duck and chicken. Dark grey represents mean Replikin Count in the Replikin Peak Gene pB1 gene area of H5N1 isolates from goose, duck, chicken and human in isolates from 2001 through 2006 where data was publicly available at www.pubmed.com. Light grey represents standard deviation from the mean.

[0159] Replikin analysis was performed separately for H5N1 Replikin Peak Genes of each host group, namely, goose, duck, chicken and human. Low levels of Replikin count, below 4, were observed in each host group until 2005-2006. In 2005-2006 epidemics began to increase in Asian countries. While duck H5N1 counts decreased in 2006, they continued to increase in chicken H5N1 in 2006. Human RPG activity was upregulated in 2005-2006 and overtook RPG activity in chickens. This transition of Replikin Count increase from duck to chicken to human is in agreement with epidemiological evidence of the order of transfer of the virus between hosts. Changes in Replikin Count in the Replikin Peak Gene of the H5N1 isolates as in FIG. 5 allow for identification of those hosts in which the influenza virus strain is more virulent than other hosts.

[0160] FIG. 6 illustrates localization of human H5N1 isolates having the highest lethality by measuring mean Replikin Counts in isolates of human H5N1 from different geographic areas isolated in a given year. FIG. 6 is a bar graph depicting the number (with standard deviation) of Replikins per 100 amino acids in the pB1 gene area (Replikin Peak Gene) of H5N1 influenza virus strains identified annually in humans in Japan, Russia, Egypt, China, Vietnam, Thailand and Indonesia between 2003 and 2006.

[0161] Replikin analysis was performed separately for human H5N1 RPGs of each country. The results are shown for the Replikin Count for all data available on PubMed each year from 2003-2006. Low levels of Replikin count, below 4, were observed in each host group until 2005-2006, when human H5N1 increased in Asian countries. Human RPG activity was upregulated in 2005-2006 most prominently in Indonesia. The country most likely to first experience the increased human mortality was predicted in 2006 to be Indonesia. This prediction was proven correct in 2007 where incidence of human morbidity and mortality in the Indonesian outbreak were exceptionally high and evidence of possible human to human transmission was observed. Changes in Replikin Count in the Replikin Peak Gene of the H5N1 isolates such as in FIG. 6 allow for identification of those geographic areas in which the influenza virus strain is more virulent than other geographic areas.

[0162] FIG. 7 illustrates a relationship between Replikin Counts of Replikin Peak Genes identified within the pB1, pB2, and pA genomic areas of equine influenza 1977-2007 and epidemics of equine encephalitis caused by H3N8 equine influenza. Series 1 reflects the mean Replikin Count identified in the Replikin Peak Gene in the pB1 area of the genome. Series 2 reflects the standard deviation from mean Replikin Count in the pB1 gene area. Series 3 reflects the Replikin Count identified in the Replikin Peak Gene in the pA gene area of the genome, which neighbors the pB1 gene area. Series 4 reflects the Replikin Count identified in the Replikin Peak Gene in the pB2 gene area of the genome, which also neighbors the pB1 gene area. Replikin Count increases in the pB1 gene area are observed to occur one to three years before epidemic outbreaks while no increase in Replikin Count is observed in the pB2 and pA gene areas.

[0163] FIG. 8 illustrates an increasing Replikin concentration of the whole hemagglutinin protein in the H5N1 strain of influenza virus that preceded three “Bird Flu” Epidemics between 1997 and 2004. In H5N1 influenza, the increasing strain-specific Replikin concentration (Replikin Count, Means+/−SD) 1995 to 1997 preceded the Hong Kong H5N1 epidemic of 1997 (E1); the increase from 1999 to 2001 preceded the epidemic of 2001 (E2); and the increase from 2002 to 2004 preceded the epidemic in 2004 (E3). The decline in 1999 occurred with the massive culling of poultry in response to the E1 epidemic in Hong Kong. FIG. 8 demonstrates that although Replikin Count increases in RPGs occur in ranges four to eight fold greater than the increases which can be observed in whole proteins or genomes (see, e.g., FIGS. 1 and 2), changes in the Replikin Counts of whole proteins or genomes have the advantage of completeness and may be large enough to be detected and statistically significant.

[0164] FIG. 9 illustrates an increase in Replikin Count in spike and nucleocapsid coronavirus proteins preceding the SARS coronavirus epidemic of 2003. The x-axis indicates the year and the y-axis indicates the Replikin Count. The appearance of the SARS outbreak and the eight countries involved in the outbreak is shown by the conical shaded area. The solid black symbols represent the mean Replikin concentration for spike coronavirus proteins and the vertical black bars represent the standard deviation of the mean.

[0165] Although SARS was first identified in 2003, Applicants wondered whether the emergence of the SARS strain of coronavirus might have been presaged in the activity of the whole group of coronaviruses. The pre-pandemic increase in both nucleocapsid and spike coronavirus proteins is in accord with, and might have served as a warning of, the finding that a coronavirus would be responsible for the 2003 first SARS emergence. It may be seen that the Replikin Count rose between 1995 and 2002, consistent with the SARS coronavirus outbreak, which emerged at the end of 2002 and persisted into 2003. The decline in Replikin Count correctly signaled the end of the SARS outbreak and had already begun its return to pre-outbreak levels when the outbreak emerged. A similar decline occurred on termination of Influenza A epidemics and pandemics (FIG. 2). As also seen in FIG. 2, however, this decline has not occurred in the case of H5N1 in 2006 and 2007, so that the ongoing H5N1 outbreak may be assumed not to be over.

[0166] FIG. 10 illustrates that mortality rates in humans from Plasmodium falciparum correlate with Replikin Count in the P. falciparum ATP-ase enzyme. High malaria morbidity and mortality rates occurred in the late 1990s and was thought to be due to adaptation of the microorganism and decreased effectiveness of anti-materials. ATP-ase is a primary target of arteminisin treatment of malaria. With increased use of arteminisin, and improved public health measures, morbidity and mortality rates declined from 1998 to 2006. The Replikin Count of P. falciparum ATP-ase increased from 1997 to 1998 along with an increase in mortality per 250 malaria cases. The Replikin Count of P. falciparum ATP-ase decreased along with mortality rates from 1998 to 2006. Mortality rates per 250 cases for 1997 to 2006 were as follows: 1997 mortality rates was 7.7; 1998 mortality rate was 6.6; 1999 mortality rate was 9.1; 2000 mortality rate was 10.5; 2001 mortality rate was 8.1; 2002 mortality rate was 9.9; 2003 mortality 2.5; 2004 mortality rate was 4; 2005 mortality rate was 3.9; 2006 mortality rate was 2.6. Mortality rates declared by the World Health Organization, see www.who.int.

[0167] FIG. 11 illustrates a relationship between Replikin Counts observed in the VP1 protein (Replikin Peak Gene) of isolates of publicly-available foot and mouth disease virus serotype-O between 1969 and 2006 and certain observed outbreaks of Foot and Mouth Disease. Standard deviations are represented by vertical light grey capped lines above mean Replikin Counts. Observed European and UK outbreaks of Foot and Mouth Disease are noted including outbreaks in the UK in 1967, 1981, 2001 and 2007, in Baltic states in 1991 and 1993 through 1996, and Japan, Korea and Greece in 2000. Increases in Replikin Counts from baseline values between 1969 and 1978 preceded repeated increased Replikin counts 1979 forward, which in turn preceded outbreaks of foot and mouth disease 1981 to 2007.

[0168] FIG. 12 illustrates a relationship between Replikin Counts observed in the envelope protein of isolates of west nile virus and total human morbidity and mortality. The data for FIG. 12 is contained in Table 10. A correlation between Replikin Count in the envelope protein (the protein containing the RPG of the virus), and Morbidity and Mortality is demonstrated. FIG. 12 is a graph comparing (1) the concentration of Replikin (Replikin Count) of publicly available sequences of the envelope protein of isolates of west nile virus between 1982 and 2007 (with standard deviation bars for each data point), (2) total morbidity reported in the United States on a year by year basis by the Center for Disease Control (total U.S. morbidity is the value denoted on the y-axis times 100) between 1999 and 2007, and (3) total mortality resulting from WNV infection reported in the United States on a year by year basis by the Center for Disease Control between 1999 and 2007.

[0169] FIG. 13 illustrates Replikin Counts in the nucleocapsid protein of the porcine respiratory and reproductive syndrome virus (PRRSV) in isolates from 2004 through 2007. Mean Replikin Count is shown in grey columns. Standard deviation from the mean is shown in colorless columns. The Replikin Count of PRRSV nucleocapsid protein is seen to increase between 2004 and 2007. This increase correlates with a major outbreak of PRRSV in China. Standard deviation from the mean in 2005 is considerably larger than other years demonstrating a marked increase in Replikin Count was occurring in 2005 and measured as an increase in mean Replikin Count in 2006. The large standard deviation observed in 2005 indicates that more members of the class had increasing Replikin Counts. Standard deviation in 2005 was an early warning prior to the increase in the mean in 2006 and 2007. A similar phenomenon is observable in FIG. 7.

[0170] FIG. 14 illustrates a correlation between cumulative survival of Litopenaeus vannamei shrimp challenged with four different taura syndrome virusisolates over 15 days (unless 100% mortality occurred prior to 15 days) and the Replikin concentration of Open Reading Frame 1 (ORF1) of each isolate. Translated amino acid sequences of ORF 1 of the genome of individual isolates of TSV from Belize, Thailand, Hawaii and Venezuela were analyzed for Replikin Count. Replikin Count was determined to be 3.5 for the Belize isolate, 3.4 for the Thailand isolate, 3.3 for the Hawaii isolate and 3.0 for the Venezuela isolate. Graph A illustrates observed percent survival in three trials of shrimp challenged with the Belize isolate of TSV. In one trial, total mortality was observed on day 6. In the other trials, total mortality was observed on day 11. Graphs B, C and D illustrate observed percent survival of shrimp challenged with the Thailand isolate, the Hawaii isolate and the Venezuela isolate, respectively, each in three trials over 15 days. In the Thailand isolate, a mean of 80% percent mortality was observed on day 15. In the Hawaii isolate, a mean of 78.3% mortality was observed on day 15. In the Venezuela isolate, a mean of 58.3% mortality was observed on day 15.

[0171] FIG. 15A illustrates a direct sequential correlation between Replikin Count in isolates of taura syndrome virus (TSV) collected from Belize, Thailand, Hawaii and Venezuela, respectively, and mean number of days to 50% mortality in Litopenaeus vannamei shrimp challenged with the respective TSV isolates beginning on day one through day three. Statistical differences between the Replikin concentration for each isolate are significant at a level of p<0.001.

[0172] FIG. 15B illustrates a direct correlation between Replikin Count in isolates of taura syndrome virus (TSV) collected from Belize, Thailand, Hawaii and Venezuela, respectively, and mean cumulative survival of Litopenaeus vannamei shrimp at 15 days after challenge with the respective TSV isolate. Statistical differences between the Replikin concentrations for each isolate are significant at a level of p<0.001.

[0173] FIG. 16 illustrates a magnification of the effect of increases in Replikin Count on human mortality from H5N1 infections when Replikin concentration is observed in the pB1 gene area (containing a RPG) as compared to the polymerase gene or as compared to the entire genome of the H5N1 virus. In FIG. 16, a correlation is established between human mortality and (1) mean concentration of Replikin sequences in the whole genome, (2) mean concentration of Replikin sequences in the polymerase gene, and (3) mean concentration of Replikin sequences in the Replikin Peak Gene (pB1 gene area) of H5N1 influenza strains. Replikin concentration in the Replikin Peak Gene (pB1 gene area) of the H5N1 genome is seen to correlate most significantly with human mortality as compared to Replikin Counts in the whole genome and the polymerase gene.

[0174] FIG. 17 illustrates a significant eight-fold increase in Replikin concentration in the pB1 gene area (Replikin Peak Gene) of isolates of H5N1 from 2003 through the first quarter of 2007 (that correlates with an increase in host mortality in humans), while no significant increase is observed in neighboring gene areas of the pB1 gene area, namely, the pA gene area and the pB2 gene area. FIG. 17 graphically compares percent human mortality from H5N1 infections in years 2005 through the first quarter of 2007 to mean concentration of Replikin sequences in (1) the pB1 gene area, (2) the pB2 gene area, and (3) the pA gene area, respectively, of H5N1 influenza strains isolated in 2003 through the first quarter of 2007.

[0175] FIG. 18 illustrates a correlation between the mean Replikin Count and standard deviation of Replikin sequences observed in publicly available amino acid sequences of white spot syndrome virus (WSSV) isolated between 1995 and 2007 and a significant outbreak of WSSV in 2001. The remarkably high Replikin concentration in 2000 of 97.6 predicts the 2001 outbreak. Furthermore, an even more remarkable Replikin concentration of 103.8 was observed in a ribonucleotide reductase protein sequence from a 2000 isolate of WSSV wherein a Replikin Peak Gene was identified with an even higher Replikin concentration of 110.7.

[0176] FIG. 19 illustrates a correlation between increased Replikin Count in the genome of taura syndrome virus and outbreaks of the virus in 2000 and 2007 in shrimp. taura syndrome virus peptide sequences available at www.pubmed.com were analyzed by the inventors for mean Replikin concentration in the publicly available sequences. FIG. 19 is a graph comparing mean Replikin concentration for each year in which peptide sequences were publicly available between 2000 and 2005 (with standard deviation) and dates of significant outbreaks of taura syndrome virus. Significant outbreaks of the disease are noted at years 2000 and 2007. It may be observed from the graph that outbreaks of the virus occur following an increase in Replikin concentration. In year 2000, TSV had a Replikin Count of 2.7. Between 2001 and 2004, TSV had a lower mean Replikin Count, as low as 0.7, and an identified Replikin Scaffold disappeared. In 2005 the Replikin Scaffold reappeared, with an increase in lysines and histidines, and a commensurate increase in Replikin concentration to 1.8, followed by an increase in TSV outbreaks in 2006-2007.

[0177] FIG. 20 illustrates the total hemagglutinin Replikin Counts in the three influenza pandemics of the last century. Strain-specific high Replikin Counts accompany each of the three pandemics of the last century: 1918, 1957, and 1968. In each case this peak is followed by a decline (likely due to immunity in the hosts), then by a recovery and a “rebound” epidemic. The probability is very low that these correlations are due to chance, since they are specific for each strain, specific for each of the three pandemic years out of the century, specific for each post-pandemic decline, and specific for each rebound epidemic. Example 13 provides an example of analysis of hemagglutinin Replikin Counts in publicly available sequences between 1918 and 2007.

[0178] FIG. 21 illustrates an annual mean Replikin Count observed in isolates of porcine circovirus (PCV) having publicly available accession numbers on a year by year basis between 1997 and 2007 (with standard deviation bars for each Replikin Count data point) and demonstrates a correlation between increases in Replikin Count from 2000 through 2007 and reported increased in morbidity and mortality in Canada between 2000 and 2006 and an outbreak in China in 2007.

### DETAILED DESCRIPTION OF THE INVENTION

### Definitions

[0179] As used herein, a Replikin Peak Gene (RPG) (or sometimes a Replikin Peak Gene Area-RPGA) is to mean a segment of a genome, protein, segment of protein, or protein fragment in which an expressed gene or gene segment has a highest concentration of continuous, non-interrupted and overlapping Replikin sequences (number of Replikin sequences per 100 amino acids) when compared to other segments or named genes of the genome. Generally, a whole protein or gene or gene segment that contains the amino acid portion having the highest concentration of continuous Replikin sequences is also referred to as the Replikin Peak Gene. More than one RPG may be identified within a gene, gene segment, protein, or protein fragment. An RPG may have a terminal lysine or a terminal histidine, two terminal lysines, or a terminal lysine and a terminal histidine. For diagnostic, therapeutic and preventive purposes, an RPG may have a terminal lysine or a terminal histidine, two terminal lysines, or a terminal lysine and a terminal histidine or may likewise have neither a terminal lysine nor a terminal histidine so long as the terminal portion of the RPG contains a Replikin sequence or Replikin sequences defined by the definition of a Replikin sequence, namely, an amino acid sequence having about 7 to about 50 amino acids comprising:
[0180] (1) at least one lysine residue located six to ten amino acid residues from a second lysine residue;
[0181] (2) at least one histidine residue; and
[0182] (3) at least 6% lysine residues.
   Further, for diagnostic, therapeutic, preventive and predictive purposes, an RPG may include the protein or protein fragment that contains an identified RPG. For example, an RPG is herein identified in the pB1 gene area of H5N1. For predictive purposes, a Replikin Count in the RPG may be used to track changes in virulence and lethality. Likewise the RPG may be used as an immunogenic compound or as a vaccine. Additionally, however, as described herein, a Replikin Count in the pB1 gene area of influenza strains (like, for example, H5N1, H1N1 and H3N8), which contains but is not limited to an identified RPG having highest concentration of continuous, non-interrupted and overlapping Replikin sequences, is particularly useful for predicting changes in lethality and virulence. Other examples of predictive use of Replikin Counts in proteins in which RPGs have been identified are the VP1 protein of foot and mouth disease virus, the envelope protein in the west nile virus, and the nucleocapsid protein in porcine respiratory and reproductive syndrome virus, among many other viruses and organisms. Whole proteins or protein fragments containing RPGs are likewise useful for diagnostic, therapeutic and preventive purposes, such as, for example, to be included in immunogenic compounds, vaccines and for production of therapeutic or diagnostic antibodies.

[0183] As used herein, a Replikin sequence is an amino acid sequence having about 7 to about 50 amino acids comprising:
[0184] (1) at least one lysine residue located six to ten amino acid residues from a second lysine residue;
[0185] (2) at least one histidine residue; and
[0186] (3) at least 6% lysine residues.

[0187] A Replikin sequence may comprise a terminal lysine and may further comprise a terminal lysine or a terminal histidine. A Replikin peptide or Replikin protein is a peptide or protein consisting of a Replikin sequence. A Replikin sequence may also be described as a Replikin sequence of about 7 to about 50 amino acids comprising or consisting of a Replikin motif wherein the Replikin motif comprises:
[0188] (1) at least one lysine residue located at a first terminus of said isolated influenza virus peptide and at least one lysine residue or at least one histidine residue located at a second terminus of said isolated influenza virus peptide;
[0189] (2) a first lysine residue located six to ten residues from a second lysine residue;
[0190] (3) at least one histidine residue; and
[0191] (4) at least 6% lysine residues.
   For the purpose of determining Replikin concentration, a Replikin sequence must have a lysine residue at one terminus and a lysine or a histidine residue at the other terminus.

[0192] The term “Replikin sequence” can also refer to a nucleic acid sequence encoding an amino acid sequence having about 7 to about 50 amino acids comprising:
[0193] (1) at least one lysine residue located six to ten amino acid residues from a second lysine residue;
[0194] (2) at least one histidine residue; and
[0195] (3) at least 6% lysine residues,
   wherein the amino acid sequence may comprise a terminal lysine and may further comprise a terminal lysine or a terminal histidine.

[0196] As used herein, “animal” includes mammals, such as humans.

[0197] As used herein, the term “peptide” or “protein” refers to a compound of two or more amino acids in which the carboxyl group of one amino acid is attached to an amino group of another amino acid via a peptide bond. As used herein, “isolated” or “synthesized” peptide or biologically active portion thereof refers to a peptide that is, after purification, substantially free of cellular material or other contaminating proteins or peptides from the cell or tissue source from which the peptide is derived, or substantially free from chemical precursors or other chemicals when chemically synthesized by any method, or substantially free from contaminating peptides when synthesized by recombinant gene techniques or a protein or peptide that has been isolated in silico from nucleic acid or amino acid sequences that are available through public or private databases or sequence collections. An “encoded” or “expressed” protein, protein sequence, protein fragment sequence, or peptide sequence is a sequence encoded by a nucleic acid sequence that encodes the amino acids of the protein or peptide sequence with any codon known to one of ordinary skill in the art now or hereafter. It should be noted that it is well-known in the art that, due to redundancy in the genetic code, individual nucleotides can be readily exchanged in a codon and still result in an identical amino acid sequence. As will be understood by one of skill in the art, a method of identifying a Replikin amino acid sequence also encompasses a method of identifying a nucleic acid sequence that encodes a Replikin amino acid sequence wherein the Replikin amino acid sequence is encoded by the identified nucleic acid sequence.

[0198] As used herein, “reservoir” is any source of Replikin sequences that may be shared with a virus, organism or malignancy including any host of a virus, organism or malignancy, any food source of a host of the virus, organism or malignancy, any vector of virus, organism or malignancy, or any substance wherein the genetic information of a virus, organism or malignancy that may be shared, mingled, mixed, exchanged, or come into the proximity of the Replikin sequences of the reservoir.

[0199] As used herein, “different time periods” or “different time points” is any two time periods or points that may be differentiated one from another. For example, an isolate of virus isolated during the year 2004 is isolated in a different time period than an isolate of the same virus isolated during the year 2005. Likewise, an isolate of virus isolated in May 2004 is isolated in a different time period than an isolate of the same virus isolated in June 2004. When comparing Replikin concentrations of different isolates, it is preferred to use comparable time periods for comparison. For example, an isolate from 2004 is preferably compared to at least one other isolate from some other year such as 2002 or 2005. Likewise, an isolate from May 2004 is preferably compared to at least one isolate from some other month of some year, for example, an isolate from December 2003 or from June 2004. An isolate is any virus isolated from a natural source wherein a natural source includes, but is not limited to, a reservoir of a virus, a vector of a virus or a host of a virus. “Obtaining” an isolate is any action by which an amino acid or nucleic acid sequence within an isolate is obtained including, but not limited to, isolating an isolate and sequencing any portion of the genome or protein sequences of the isolate, obtaining any nucleic acid sequence or amino acid sequence of an isolate from any medium, including from a database such as PubMed, wherein the nucleic acid sequence or amino acid sequence may be analyzed for Replikin concentration, or any other means of obtaining the Replikin concentration of a virus isolated from a natural source at a time point.

[0200] As used herein, an earlier-arising virus or organism or a virus or organism isolated at an earlier time period is a specimen of a virus or organism collected from a natural source of the virus or organism on a date prior to the date on which another specimen of the virus or organism was collected from a natural source. For viruses, a natural source includes, but is not limited to, a reservoir of a virus, a vector of a virus, or a host of the virus. A later-arising virus or organism or a virus or organism isolated at a later time period is a specimen of a virus or organism collected from a natural source of the virus (including, but not limited to, a reservoir, a vector, or a host) or a natural source of the organism on a date subsequent to the date on which another specimen of the virus or organism was collected from a natural source.

[0201] As used herein, “emerging strain” refers to a strain of a virus identified as having an increased or increasing concentration of Replikin sequences in one or more of its protein sequences relative to the concentration of Replikins in other strains of such organism. The increased or increasing concentration of Replikins occurs over a period of preferably at least about six months, at least about one year or at least about three years, but may be a much shorter period of time for highly mutable viruses. An emerging strain of virus indicates an increase in lethality, virulence or replication.

[0202] As used herein, “bird” is any avian species including migratory and domestic birds, wherein said migratory and domestic birds includes, for example, chickens, ducks of all kinds, geese, pigeons, gulls, seabirds etc.

[0203] As used herein, “outbreak” is an increase in virulence, morbidity or mortality in a viral disease as compared to a baseline of an earlier occurring epidemiological pattern of infection in the same viral disease. One of ordinary skill in the art will know how to determine an epidemiological baseline. As used herein, “morbidity,” is the number of cases of a disease caused by the virus, either in excess of zero cases in the past or in excess of a baseline of endemic cases in the past. Therefore the baseline of endemic cases, in epidemiological terms, may, for example, relate to whether no or some cases were present in a geographic region in the immediate past. The past, in epidemiological terms, may mean more than one year and can mean several years or more as understood by one of ordinary skill in the art. The past may also mean less than one year as determined by one of ordinary skill in the art. In the case of annually-recurrent common influenza, for example, the baseline reflects an annual recurrence of common influenza.

[0204] As used herein, “mutation” refers to a change in the structure and properties of a virus or organism caused by substitution of amino acids. In contrast, the term “conservation” as used herein, refers to conservation of particular amino acids due to lack of substitution. A “point mutation” may refer to a change in a single amino acid residue or may refer to a change in a small number of amino acid residues.

[0205] As used herein, “segment” or “portion” of a genome, protein or protein fragment refers to any nucleic acid sequence of any size within a genome or any amino acid sequence of any size within a protein or protein fragment wherein the termini of the nucleic acid sequence may be any two nucleic acid residues within the genome and the termini of the amino acid sequence may be any two amino acid residues within the protein or protein fragment.

[0206] As used herein, “Replikin Count” or “Replikin Concentration” refers to the number of Replikins per 100 amino acids in a protein, protein fragment, virus, or organism. A higher Replikin concentration in a first strain of a virus or organism has been found to correlate with more rapid replication of the first virus or organism as compared to a second, earlier-arising or later-arising strain of the virus or organism having a lower Replikin concentration.

[0207] As used in this patent application, the term “continuous Replikin sequences” means a series of two or more Replikin sequences that are overlapped or are directly covalently linked.

[0208] As used herein a “Replikin Scaffold” refers to a series of conserved Replikin peptides wherein each of said Replikin peptide sequences comprises about 16 to about 34 amino acids, and preferably about 27 to about 33 amino acids and further comprises: (1) a terminal lysine and optionally a lysine immediately adjacent to the terminal lysine; (2) a terminal histidine and optionally a histidine immediately adjacent to the terminal histidine; (3) a lysine within 6 to 10 amino acid residues from another lysine; and (4) about 6% lysine. “Replikin Scaffold” also refers to an individual member or a plurality of members of a series of Replikin Scaffolds.

[0209] In an influenza virus, a Replikin Scaffold may refer to a Replikin peptide sequence comprising about 16 to about 34 amino acid residues, and in a preferred embodiment about 28 to about 30 amino acid residues. In a white spot syndrome virus, a Replikin Scaffold may refer to a Replikin peptide sequence comprising about 16 to about 34 amino acid residues, and in a more preferred embodiment about 29 to about 31 amino acid residues. In a taura syndrome virus, a Replikin Scaffold may refer to a Replikin peptide sequence comprising about 16 to about 34 amino acid residues, and in a more preferred embodiment about 29 to about 33 amino acid residues.

[0210] I. Replikin Count in Replikin Peak Gene is Predictive of and Related to Virulence and Lethality in Malignancies, Influenza and Other Pathogens and Replikin Peak Genes and Associated Replikin Sequences are Useful for Diagnostic, Therapeutic and Predictive Purposes

[0211] A virus Replikin gene related to lethality and virulence was first identified by Applicants in human H5N1 Influenza And was labeled a Replikin Peak Gene. Replikin Peak Genes were subsequently isolated in silico in numerous other viruses, bacteria, and protozoa. Replikin Peak Genes have now been associated with lethality in plant, fish, crustacea and vertebrate hosts. Because of their association with lethality, virulence and rapid replication, Replikin Peak Genes are now available as excellent targets for therapeutic and preventive treatments for a wide range of malignancies and pathogens.

[0212] Replikins, a class of peptides related to rapid replication, are 7 to 50 amino acids long, containing at least 2 lysine groups 6 to 10 amino acids apart, at least 1 histidine group, and at least 6% lysine. The phenomenon of the association of Replikins with rapid replication and virulence has been fully described in U.S. Pat. No. 7,189,800, U.S. Pat. No. 7,176,275, U.S. application Ser. No. 11/355,120, U.S. application Ser. No. 10/860,050 and U.S. application Ser. No. 10/105,232. Both Replikin concentration (number of Replikins per 100 amino acids) and Replikin composition have been correlated with the functional phenomenon of rapid replication.

[0213] Using an algorithm constructed to identify, count, and track Replikin sequences historically, Replikins were analyzed in 130,488 protein and genome sequences, representing all the accession numbers for common strains of influenza and some other lethal virus isolations published between 1917 and 2007 and reported on PubMed. Genomic areas with the highest concentration of continuous Replikins were isolated and named Replikin Peak Genes (RPGs).

[0214] Analysis of all publicly available protein and genome sequences for lethal Influenza A strains, including HSN 1, revealed 10,182 RPGs. RPGs were found to be present in isolates from all outbreaks of lethal influenza between 1917 and 2007 and the number of Replikin sequences per 100 amino acids (Replikin Count) in the identified RPGs was consistently observed to be above four and increased to as high as 29. In a significant control in Influenza B virus, which is non-lethal in humans, the Replikin Count in all 371 RPGs in Influenza B between 1940 and 2006 were found never to exceed four. Replikin Counts below four in the RPG of Influenza B virus contrasts with lethal Influenza A strains (with Replikin Counts as high as 29). RPG Replikin Counts during quiescent (or non-lethal) periods of Influenza A, were regularly observed to be four or below.

[0215] Replikin Counts below four for non-lethal isolates of influenza may be compared to highly lethal or virulent viruses such as ebola virus, which has been observed to have a Replikin Count of 32, Porcine Reproductive and Respiratory Virus (PRRSV) in pigs, which has been observed to have a Replikin Count of 43, gemini yellow leaf curl virus in tomato plants observed to have a Replikin Count of 56, hemorrhagic septicemia virus in fish observed to have a Replikin Count of 59, and white spot syndrome virus in shrimp, which has been observed to have a Replikin Count of 106. All of these viruses were observed to return to low counts during quiescent periods. Increased Replikin Counts in RPGs also were found in Mycobacterium tuberculosis (28), in methicillin-resistant Staphylococcus aureus (81), in Plasmodium falciparum (malaria) (153), and in lung cancer (261).

[0216] Analysis of Replikin Counts in genomic and proteonomic sequences alone prospectively correctly predicted: 1) the order of lethality in shrimp of four strains of taura syndrome virus (prediction was made blind in a laboratory study); 2) a 2007 increase in H5N1 percent mortality in humans; and 3) the country in which the increased percent mortality would occur most significantly, namely, Indonesia.

[0217] In addition to high Replikin Counts, analysis of rapidly replicating, virulent and lethal virus has revealed a series of conserved Replikin peptides associated with rapid replication, virulence and lethality known as Replikin Scaffolds. Replikin Scaffolds were observed in influenza virus strains where, for example, a 29-amino acid Replikin Scaffold has been conserved for 90 years in the genome of successive influenza virus strains. The scaffold has been present in each of the lethal influenza pandemics of 1918, 1957 and 1968 and in each lethal H5N1 outbreaks. Repeating signatures such as a KHKK (SEQ ID NO: 1584) signature has been observed in Replikin sequences within RPGs of lethal malignancies, viruses and organisms. The KHKK (SEQ ID NO: 1584) signature has been observed eleven times within the RPG of the protozoa that causes most malaria, P. falciparum. The KHKK (SEQ ID NO: 1584) signature has been observed 20 times within the RPG of a tobacco mocaic virus that induced exacerbated cell death in a pepper plant. The KHKK (SEQ ID NO: 1584) signature has been observed 57 times in non-small cell lung carcinoma within 52 Replikins observed within the 18 amino acid RPG identified in chromosome 9 of a non-small cell lung carcinoma. The presence of such a high number of KHKK (SEQ ID NO: 1584) signatures within the 18 amino acid RPG of the non-small cell lung carcinoma is explained by overlapping of the signatures. Overlapping of Replikin sequences and repeated signatures such as KHKK (SEQ ID NO: 1584) has now been associated with lethality, virulence and rapid replication. Together, these data indicate that a Replikin gene is quantitatively associated with lethal functions, and may be a mobile agent of lethality transferring between strains and species.

[0218] Whether Replikins can arise by synthesis de novo or are transferred from one organism or virus to another (or both) is yet to be determined. There is some beginning evidence for both. In one experiment, Replikin synthesis and/or transfer was facilitated in the laboratory in glioblastoma multiforme cells growing in tissue culture. The event, which facilitated the synthesis and/or transfer, was induced anoxia. Whether the anoxia stimulates increased rate of Replikin synthesis or membrane impairment facilitates Replikin transfer, or both, is yet to be determined.

[0219] Counting of Replikin sequences within a malignancy, a virus, a protozoon, a plant or an animal is aided by computer review of databases of gene and protein sequences. Bacteria were accepted as real when the light microscope permitted them to be seen as discrete entities, sufficiently discrete that they could be counted. Similarly, viruses were accepted as real when the electron microscope permitted them to be seen as discrete entities, sufficiently discrete that they could be counted. Likewise, Replikins can now be accepted as real since the “computer microscope” permits them to be seen as discrete entities, sufficiently discrete that they can be counted. Hence, the Replikin Count, or determination of number of Replikin Sequences in 100 amino acids in any given genomic or proteomic sequence, is facilitated on a large scale by computer analysis and comparison of Replikin Counts has provided the necessary evidence to associate increased Replikin Counts (in both whole genomes and Replikin Peak Genes) with lethality.

[0220] Visualization and counting of Replikin sequences in a wide range of genomes has now revealed that Replikin sequences are not scattered throughout the genome of lethal, virulent and rapidly replicating entities but, instead, are concentrated in particular areas of the genome. The concentration of Replikin sequences in a particular area of the genome has now been identified as a Replikin Peak Gene (RPG). Concentration of Replikin sequences in a RPG provides a magnification of the Replikin Count and a magnification of the developmental, growth and disease associations with the presence of Replikin Sequences. See, e.g., FIGS. 1, 3, 16 and 17. This magnification not only makes identification and counting easier, but facilitates the discovery of both the structural history and the functional associations of Replikins, as seen, for example, in the increase in Replikin Count of the RPG of human H5N1 with the increased percent human mortality between 2003 and 2007. FIGS. 4, 16 and 17.

[0221] The magnification effect of analyzing the Replikin Count of a Replikin Peak Gene as compared to Replikin Counts from other parts of a genome or the whole genome is demonstrated in FIGS. 16 and 17. There, mortality in humans from H5N1 infection correlates strongly with an increase in Replikin Count in the pB1 gene area (RPG) of the virus while correlating less strongly with an increase in Replikin Count in the polymerase gene or the whole genome of the virus.

[0222] By means of visual and software inspection, Applicants have analyzed 130,488 protein and genome sequences from common strains of influenza and other lethal viruses, isolated from 1917 to 2007 and accessible in PubMed. Replikin sequences in these 130, 488 sequences have been identified, counted and annually tracked. This extensive analysis revealed the Replikin Peak Gene that has not been found to be quantitatively related to lethality in several hosts, including plants, fish, crustacea and vertebrates, such as humans.

[0223] II. Prediction of Pathogenic Outbreaks and Lethal Malignancies

[0224] Prediction of epidemics and future outbreaks of viruses such as Influenza A (including H1N1, H2N2, H3N2, H3N8 and H5N1), foot and mouth disease virus, west nile virus, porcine reproductive and respiratory syndrome virus, porcine circovirus, white spot syndrome virus, taura syndrome virus, tobacco mosaic virus, coronavirus, and SARS virus, may be made, for example, by reviewing the Replikin concentration of isolates of a virus strain and comparing the Replikin concentration for a particular time period with Replikin concentrations from another time period. Prediction of outbreaks or increases in virulence or lethality of organism may also be made, for example, by reviewing the Replikin concentration of isolates of an organism and comparing the Replikin concentration for a particular time period with Replikin concentrations from another time period. Organisms for which outbreaks or increases in virulence and lethality may be predicted include, for example, P. falciparum, M mucogenicum and S. aureus.

[0225] The difference in time period may be, for example, one month, six months, one year, three years or more. Preferably, the difference in time period is six months to three years. Also preferably, the difference in time period is one year. A significant increase in Replikin concentration from one year to the next and preferably over one, two, three or five years provides predictive value of an emerging strain of virus or organism that may begin an outbreak. A viral or other pathogenic outbreak may be predicted within about six months to about one to about three-years from the observation of a significant increase in Replikin concentration. The outbreak is preferably predicted within about one to about two years. An outbreak of virus or other pathogen, therefore, may be predicted within 1 to about 2 years as demonstrated in FIGS. 2, 3, 7, 11 and 19 wherein an epidemic occurred at about 1 to about 2 years following each peak of the measured Replikin Count of the particular viruses and organisms.

[0226] Significant increases may be observed over a time period of more than one year, such as three, four, five or more years. An outbreak may likewise be predicted within about six months to about one year or more from the initial observation of an observable decrease in Replikin concentration following a significant increase.

[0227] The correlation between Replikin concentration and viral outbreaks noted throughout this application provide a method of predicting outbreaks of virus and other pathogens by monitoring increases or decreases in Replikin concentration in the RPG of isolates of the virus or other pathogen. Likewise, the lethality of an organism may be predicted by comparing the Replikin Count of the identified RPG of a malignancy with the Replikin Count of the identified RPG of another malignancy of the same type.

[0228] III. Replikin Peak Gene Sequences in Diagnostics and Therapies

[0229] High Replikin concentrations and RPGs have been shown to be related to rapid replication, viral outbreaks, epidemics, morbidity and host mortality in, for example, influenza virus strains, including H5N1, in SARS coronavirus, in shrimp in taura syndrome virus and in white spot syndrome virus, in foot and mouth disease virus, porcine reproductive and respiratory syndrome virus and in porcine circovirus, and in malignancies such as non-small cell lung carcinoma, among others. Because Replikin sequences in general (and particularly RPGs) are chemically defined, the sequences may be synthesized by organic chemistry rather than biological techniques, and thus are more specific, more reproducible and more reliable than other targets for diagnostics and therapeutics. The chemically defined Replikin sequences identified by the applicants are likewise potentially freer of adverse reactions that are characteristic of biologically derived vaccines and antibodies.

[0230] In addition to the diagnostic power of Replikin technology shown in these examples, it is clear that recognition for the first time of this class of virus peptides, and the discovery that they are related to rapid replication, virus outbreaks and high morbidity and mortality, makes the Replikins, and particularly the Replikin Peak Gene structures illustrated herein, new conserved prime targets for treatment and vaccines against these and other viruses.

[0231] Presence of the Replikin Peak Gene correlates with an increase in virulence in various species and an increase in mortality rate in humans in influenza virus, malaria and lung cancer and in pigs in PRRSV and porcine circovirus. Because an increase in virulence and mortality rate can be correlated with the Replikin Peak Gene (RPG), portions or fragments of the RPG are available as preferred targets for treatment with vaccines, antibodies or other blocking agents. Replikins in the gene are further preferred targets for identification of virulent strains of virus and other pathogens and for prediction of outbreaks of virus and other pathogens.

[0232] IV. Immunogenic Compounds, Vaccines, Antibodies and Blocking Agents

[0233] The observations of specific Replikins and their concentration in proteins of viral and organismal pathogens and malignancies provides the first specific quantitative early chemical correlates of outbreaks and provides for production and timely administration of vaccines tailored specifically to treat the prevalent emerging or re-emerging strain virus in a particular region of the world. By analyzing the protein sequences of isolates of a virus for the presence, concentration and/or conservation of Replikins, virus outbreaks and epidemics can be predicted and treatments developed. Furthermore, the severity of such outbreaks can be significantly lessened by administering a peptide immunogenic compound or vaccine based on the Replikin sequences identified herein or using the methods provided herein or Replikin sequences found to be most abundant or shown to be on the rise in virus isolates over a given time period, such as about one to about three years.

[0234] Vaccine products against SARS Replikin sequences and H5N1 influenza virus Replikin Scaffolds have been demonstrated by Applicants. See, e.g., U.S. application Ser. No. 11/355,120, filed Feb. 16, 2006 (Examples 6 and 7), incorporated herein by reference. Replikin sequences added to the feed source of shrimp have likewise imparted measurable resistance to challenges with taura syndrome virus. See Example 19. To date, all Replikin sequences tested in rabbit or chicken have induced an immune response and the glioma Replikin sequence (SEQ ID NO: 3658) has been identified and synthesized in peptides that induce and immune response and react with natural antibody responses in humans. See U.S. Pat. No. 6,638,505.

[0235] An immunogenic compound or peptide vaccine of the invention may include a single Replikin peptide sequence or may include a plurality of Replikin sequences observed in particular virus strains. Preferably, the peptide vaccine is a Replikin Peak Gene or a Replikin sequence isolated within a Replikin Peak Gene. Further, the peptide vaccine may be based on Replikin sequence(s) shown to be increasing in concentration over a given time period and conserved for at least that period of time. A vaccine may also include a conserved Replikin peptide(s) in combination with a new Replikin(s) peptide or may be based on new Replikin peptide sequences. The Replikin peptides can be synthesized by any method, including chemical synthesis or recombinant gene technology, and may include non-Replikin sequences, although vaccines based on peptides containing only Replikin sequences, Replikin Peak Genes or Replikin sequences identified within a Replikin Peak Gene are preferred. Preferably, vaccine compositions of the invention also contain a pharmaceutically acceptable carrier and/or adjuvant.

[0236] The immunogenic compounds and vaccines of the present invention can be administered alone or in combination with antiviral drugs, such as gancyclovir; interferon; interleukin; M2 inhibitors, such as, amantadine, rimantadine; neuraminidase inhibitors, such as zanamivir and oseltamivir; and the like, as well as with combinations of antiviral drugs.

[0237] The vaccine of the present invention may be administered to any animal capable of producing antibodies in an immune response. For example, the vaccine of the present invention may be administered to a rabbit, a chicken, a pig or a human. Because of the universal nature of Replikin sequences, a vaccine of the invention may be directed at a range of strains of virus or a particular strain of virus.

[0238] V. Increased Replikin Counts in Replikin Peak Gene of pB1 Area of Influenza A Strains Correlates with Pandemics and Lethal Outbreaks

[0239] Applicants have identified Replikin Peak Genes as a segment of a genome, protein, segment of protein, or protein fragment in which an expressed gene or gene segment has the highest concentration of continuous, non-interrupted and overlapping Replikin sequences (number of Replikin sequences per 100 amino acids) as compared to other segments or named genes of a genome. The inventors have likewise identified gene areas or proteins or protein fragments containing the highest concentration of continuous, non-interrupted and overlapping Replikin sequences (number of Replikin sequences per 100 amino acids) as Replikin Peak Genes.

[0240] Increased Replikin Counts in the Replikin Peak Gene identified in the pB1 gene area of influenza A strains has now been correlated by Applicants with pandemics and lethal outbreaks of influenza. These findings correspond to the Applicants' discovery that quantitative measurement of the concentration of Replikin peptides in proteins allows for correlation of Replikin peptide concentration per 100 amino acids with virulence, morbidity, mortality, epidemics and pandemics in malignancies, and organismal and viral infections. A correlation between increased Replikin Counts in the RPG of malignancies and pathogens has been established by Applicants in, for example, human pandemic influenza viruses, H5N1 (“Bird Flu”) influenza virus, white spot syndrome virus, foot and mouth disease virus, west nile virus, porcine reproductive and respiratory syndrome virus, porcine circovirus, equine influenza virus, tobacco mosaic virus, malaria and non-small cell lung malignancies, among others. An increase in Replikin Count in these pathogens and malignancies allows for prediction of increased lethality or virulence and prediction of forthcoming outbreaks of infections.

[0241] A. Replikin Peak Gene in H5N1 Associated with Lethal Outbreak

[0242] Applicants initially identified a Replikin Peak Gene in the pB1 gene area of the genome of the H5N1 strain of influenza virus (e.g., SEQ ID NO: 1684) and observed that outbreaks of the H5N1 virus and lethality in infections from the virus correlated with increases in Replikin Count in the identified Replikin Peak Gene. FIG. 1 illustrates the localization of the pB1 gene area as the Replikin Peak Gene in the genome of the H5N1 strain of influenza virus. The data for FIG. 1 is contained in Table 1. The eight genome areas identified in the H5N1 genome are the nucleocapsid, matrix, pB2, neuraminidase, pA, NS, hemagglutinin, and pB1 gene areas. The graph in FIG. 1 reveals that Replikin sequences were found to be most concentrated in the pB1 gene area of the H5N1 virus genome. When the inventors identified the Replikin Peak Gene (RPG) in the pB1 gene area, they discovered that an increase in Replikin Count in the RPG correlated with an increase in lethality in virus infectious. As such, “upregulation” of the RPG in H5N1 was observed in 2005 and 2006 as a significant increase in mean Replikin Count and standard deviation from the mean Replikin Count were observed and this upregulation correlated with increased lethality and virulence.

[0243] Table 1 provides mean Replikin Count and standard deviation from mean for publicly available sequences at PubMed for each of the eight gene areas in isolates of H5N1 between 2003 and 2006. Where no data is available for a given year, the year is not included in the table.

TABLE 1
H5N1 Influenza

| | | | | | |
|---|---|---|---|---|---|
| | | | Mean | | |
| | | No. of | Replikin | | |
| | | Isolates | Count | | |
| | | per | per | | |
| Year | PubMed Accession Number-Replikin Count | year | year | S.D. | Significance |

VI. Human H5N1 pB1 Area

| | | | | | |
|---|---|---|---|---|---|
| 2003 | BAE07199 15 | 1 | 2.0 | 0.0 | prev p < .30 |
| 2004 | ABE97546 15 ABE97545 15 ABE97544 15 ABE97543 15 | 91 | 2.0 | 0.1 | low p < .001, |
| | ABE97542 15 ABE97541 15 ABE97540 15 ABE97539 15 | | | | prev p < .30 |
| | ABE97538 15 ABE97537 15 ABE97536 15 AAV35116 15 | | | | |
| | AAV32652 15 AAV32644 15 ABE97535 15 ABE97534 15 | | | | |
| | ABE97533 15 ABE97532 15 ABE97531 15 ABE97530 15 | | | | |
| | ABE97529 15 ABE97528 15 ABE97527 15 ABE97526 15 | | | | |
| | ABE97525 15 ABE97524 15 ABE97523 15 ABE97522 15 | | | | |
| | ABE97521 15 ABE97520 15 ABE97519 15 ABE97518 15 | | | | |
| | ABE97517 15 ABE97516 15 ABE97515 15 ABE97514 15 | | | | |
| | ABE97513 15 ABE97512 15 ABE97511 15 ABE97509 15 | | | | |
| | ABE97508 15 ABE97507 15 ABE97506 15 ABE97505 15 | | | | |
| | ABE97504 15 ABE97503 15 ABE97502 15 ABE97501 15 | | | | |
| | ABE97500 15 ABE97499 15 ABE97498 15 ABE97497 15 | | | | |
| | ABE97496 15 ABE97495 15 ABE97494 15 ABE97493 15 | | | | |
| | ABE97492 15 ABE97491 15 ABE97490 15 ABE97489 15 | | | | |
| | ABE97488 15 ABE97487 15 ABE97486 15 ABE97485 15 | | | | |
| | ABE97484 15 ABE97483 15 ABE97482 15 ABE97481 15 | | | | |
| | ABE97480 15 ABE97479 15 ABE97478 15 ABE97477 15 | | | | |
| | ABE97476 15 ABE97475 15 ABE97474 15 ABE97473 15 | | | | |
| | ABE97472 15 ABE97471 15 ABE97470 15 ABE97469 15 | | | | |
| | ABE97468 15 ABE97467 15 ABE97466 15 ABE97465 15 | | | | |
| | ABE97464 15 ABE97463 15 ABE97462 15 ABE97461 15 | | | | |
| | ABE97460 15 ABE97510 15 AAV73985 3 | | | | |
| 2005 | ABI36230 16 ABI36225 16 ABI36220 16 ABI36216 16 | 13 | 8.0 | 7.7 | low p < .01, |
| | ABI36214 15 ABI36209 15 ABI36009 15 ABI36000 14 | | | | prev p < .005 |
| | ABG78564 15 ABF56656 27 ABG78565 14 ABD16290 15 | | | | |
| | ABC72648 15 | | | | |
| 2006 | ABK34974 14 ABL31777 16 ABL31774 21 ABL31763 21 | 48 | 16.1 | 5.7 | low p < .001, |
| | ABL31752 21 ABL31741 16 ABI49393 16 ABL07027 21 | | | | prev p < .001 |
| | ABL07016 16 ABL07005 16 ABI49404 16 ABI36472 16 | | | | |
| | ABI36461 16 ABI36452 16 ABI36441 16 ABI36430 16 | | | | |
| | ABI36420 16 ABI36408 16 ABI36397 16 ABI36386 16 | | | | |
| | ABI36375 16 ABI36364 16 ABI36353 15 ABI36342 15 | | | | |
| | ABI36331 15 ABI36320 15 ABI36309 16 ABI36303 16 | | | | |
| | ABI36292 16 ABI36283 16 ABI36271 16 ABI36268 16 | | | | |
| | ABI36265 16 ABI36261 16 ABI36257 16 ABI36252 16 | | | | |
| | ABI36249 16 ABI36244 14 ABI36241 14 ABI36236 14 | | | | |
| | ABI36232 14 ABI36195 16 ABI36184 16 ABI36174 16 | | | | |
| | ABI36163 16 ABI36152 16 ABI36141 16 ABI16502 14 | | | | |

Human H5n1 Hemagglutinin Area

| | | | | | |
|---|---|---|---|---|---|
| 2003 | BAE07201 22 | 1 | 3.9 | 0.0 | |
| 2004 | AAS65618 23 AAS65615 22 ABE97634 22 ABE97633 22 | 104 | 3.9 | 0.3 | low p < .001, |
| | ABE97632 22 ABE97631 26 ABE97630 22 ABE97629 22 | | | | prev p > .50 |
| | ABE97628 22 ABE97627 22 ABE97626 21 ABE97625 22 | | | | |
| | ABE97624 22 AAV34704 22 AAS89004 22 AAV32636 22 | | | | |
| | AAV65826 22 ABE97623 22 ABE97622 22 ABE97621 22 | | | | |
| | ABE97620 22 ABE97619 22 ABE97618 22 ABE97617 22 | | | | |
| | ABE97616 22 ABE97615 22 ABE97614 22 ABE97613 20 | | | | |
| | ABE97612 22 ABE97611 20 ABE97610 19 ABE97609 22 | | | | |
| | ABE97608 22 ABE97607 22 ABE97606 22 ABE97605 22 | | | | |
| | ABE97604 11 ABE97603 22 ABE97602 22 ABE97601 22 | | | | |
| | ABE97600 22 ABE97599 22 ABE97598 22 ABE97597 22 | | | | |
| | ABE97596 22 ABE97595 22 ABE97594 22 ABE97593 22 | | | | |
| | ABE97592 22 ABE97591 18 ABE97590 18 ABE97589 18 | | | | |
| | ABE97588 22 ABE97587 22 ABE97586 22 ABE97585 22 | | | | |
| | ABE97584 22 ABE97583 21 ABE97582 22 ABE97581 22 | | | | |
| | ABE97580 22 ABE97579 22 ABE97578 22 ABE97577 22 | | | | |
| | ABE97576 22 ABE97575 24 ABE97574 22 ABE97573 22 | | | | |
| | ABE97572 22 ABE97571 22 ABE97570 22 ABE97569 22 | | | | |
| | ABE97568 22 ABE97567 22 ABE97566 22 ABE97565 22 | | | | |
| | ABE97564 21 ABE97563 22 ABE97562 22 ABE97561 22 | | | | |
| | ABE97560 22 ABE97559 22 ABE97558 22 ABE97557 19 | | | | |
| | ABE97556 23 ABE97555 22 ABE97554 24 ABE97553 22 | | | | |
| | ABE97552 22 ABE97551 22 ABE97550 22 ABE97549 22 | | | | |
| | ABE97548 23 ABE97547 22 AAW59559 8 AAW59558 7 | | | | |
| | AAW59556 4 AAW59554 6 AAW59552 16 AAW59550 16 | | | | |
| | AAW59548 12 AAV73980 16 AAV73975 8 AAV73972 16 | | | | |
| 2005 | ABC59833 17 ABB00582 17 ABG78567 17 ABG78549 17 | 18 | 4.1 | 0.3 | low p < .001, |
| | ABG20478 21 ABG20476 14 ABC70167 17 ABB86287 17 | | | | prev p < .02 |
| | ABC72655 22 ABF56648 21 ABI36045 23 ABI36044 23 | | | | |
| | ABI36043 27 ABI36042 27 ABI36041 23 ABI36040 21 | | | | |
| | ABI36012 23 ABD16284 22 | | | | |
| 2006 | ABD66293 21 ABG23657 24 ABI16504 27 ABG20472 21 | 64 | 4.1 | 0.3 | low p < .001, |
| | ABG20468 23 ABJ90343 21 ABG45944 19 ABM54180 21 | | | | prev p > .50 |
| | ABM54179 21 ABL31780 23 ABI49415 25 ABI49396 23 | | | | |
| | ABL31766 23 ABL31755 23 ABL31744 23 ABL07030 23 | | | | |
| | ABL07019 23 ABL07008 23 ABK32782 20 ABK32780 21 | | | | |
| | ABK32781 21 ABK32779 21 ABK32778 21 ABK32777 21 | | | | |
| | ABK32776 21 ABK32775 20 ABI49407 23 ABI36480 23 | | | | |
| | ABI36469 23 ABI36450 22 ABI36439 23 ABI36428 23 | | | | |
| | ABI36423 22 ABI36406 22 ABI36395 23 ABI36384 23 | | | | |
| | ABI36373 23 ABI36362 22 ABI36351 23 ABI36340 23 | | | | |
| | ABI36329 22 ABI36318 22 ABI36307 23 ABI36295 23 | | | | |
| | ABI36286 23 ABI36275 23 ABI36198 23 ABI36187 22 | | | | |
| | ABI36177 22 ABI36166 22 ABI36155 22 ABI36144 22 | | | | |
| | ABI36057 23 ABI36056 23 ABI36055 23 ABI36054 23 | | | | |
| | ABI36053 23 ABI36051 23 ABI36050 23 ABI36049 23 | | | | |
| | ABI36048 23 ABI36047 23 ABI36046 23 ABI23979 21 | | | | |

Human H5N1 NS

| | | | | | |
|---|---|---|---|---|---|
| 2004 | AAV35114 2 AAV35113 2 | 2 | 1.7 | 0.0 | low p < .002 |
| 2005 | ABF56654 27 ABF56653 27 | 2 | 3.8 | 0.0 | low p < .005 |
| 2006 | ABI16510 2 ABI16509 2 | 2 | 1.7 | 0.0 | low p < .002 |

Human H5N1 Pa

| | | | | | |
|---|---|---|---|---|---|
| 2003 | BAE07200 27 | 1 | 3.8 | 0.0 | |
| 2004 | ABL67793 27 ABL67792 27 ABL67791 27 ABL67780 31 | 102 | 4.0 | 0.5 | low p < .001 |
| | ABL67769 27 ABE97897 29 ABE97896 29 ABE97895 29 | | | | |
| | ABE97894 29 ABE97893 29 ABE97892 29 ABE97891 29 | | | | |
| | ABE97890 29 ABE97889 29 ABE97888 29 AAV35115 24 | | | | |
| | AAV32651 27 AAV32643 27 AAW59560 1 AAW59557 10 | | | | |
| | AAW59551 27 AAW59549 27 ABE97887 29 ABE97886 29 | | | | |
| | ABE97885 29 ABE97884 29 ABE97883 29 ABE97882 29 | | | | |
| | ABE97881 29 ABE97880 29 ABE97879 29 ABE97878 29 | | | | |
| | ABE97877 29 ABE97876 29 ABE97875 29 ABE97874 29 | | | | |
| | ABE97873 29 ABE97872 29 ABE97871 29 ABE97870 29 | | | | |
| | ABE97869 29 ABE97868 29 ABE97867 29 ABE97866 29 | | | | |
| | ABE97865 29 ABE97864 29 ABE97863 29 ABE97862 29 | | | | |
| | ABE97861 29 ABE97860 29 ABE97859 29 ABE97858 29 | | | | |
| | ABE97857 29 ABE97856 29 ABE97855 29 ABE97854 29 | | | | |
| | ABE97853 29 ABE97852 29 ABE97851 29 ABE97850 29 | | | | |
| | ABE97849 29 ABE97848 29 ABE97847 29 ABE97846 29 | | | | |
| | ABE97845 29 ABE97844 29 ABE97843 29 ABE97842 29 | | | | |
| | ABE97841 29 ABE97840 29 ABE97839 29 ABE97838 29 | | | | |
| | ABE97837 29 ABE97836 29 ABE97835 29 ABE97834 29 | | | | |
| | ABE97833 29 ABE97832 29 ABE97831 29 ABE97830 29 | | | | |
| | ABE97829 29 ABE97828 29 ABE97827 29 ABE97826 29 | | | | |
| | ABE97825 29 ABE97824 29 ABE97823 29 ABE97822 29 | | | | |
| | ABE97821 29 ABE97820 29 ABE97819 29 ABE97818 29 | | | | |
| | ABE97817 29 ABE97816 29 ABE97815 29 ABE97814 29 | | | | |
| | ABE97813 29 ABE97812 29 ABE97811 29 AAV73982 7 | | | | |
| | AAV73977 4 AAV73974 4 | | | | |
| 2005 | ABL67826 27 ABL67815 28 ABL67804 28 ABI36229 33 | 15 | 3.8 | 0.4 | low p > .50, |
| | ABI36224 33 ABI36222 26 ABI36219 26 ABI36212 27 | | | | prev p < .05 |
| | ABI36011 27 ABI36002 27 ABG78563 22 ABG78562 22 | | | | |
| | ABF56655 27 ABD16289 27 ABC72649 24 | | | | |
| 2006 | ABK34973 28 ABL31779 31 ABL31765 27 ABL31754 27 | 47 | 3.8 | 0.3 | low p < .20, |
| | ABL31743 27 ABI49414 27 ABI49395 27 ABL07029 27 | | | | prev p > .50 |
| | ABL07018 31 ABL07007 31 ABI49406 27 ABI36481 26 | | | | |
| | ABI36470 26 ABI36451 27 ABI36440 27 ABI36429 27 | | | | |
| | ABI36419 27 ABI36407 27 ABI36396 32 ABI36385 32 | | | | |
| | ABI36374 32 ABI36363 27 ABI36352 27 ABI36341 27 | | | | |
| | ABI36330 23 ABI36319 23 ABI36308 27 ABI36302 27 | | | | |
| | ABI36291 27 ABI36282 27 ABI36273 27 ABI36267 27 | | | | |
| | ABI36260 27 ABI36256 27 ABI36255 27 ABI36251 27 | | | | |
| | ABI36247 27 ABI36240 27 ABI36238 27 ABI36235 27 | | | | |
| | ABI36197 27 ABI36186 27 ABI36176 27 ABI36165 27 | | | | |
| | ABI36154 27 ABI36143 27 ABI16503 24 | | | | |

Human H5N1 Neuraminidase

| | | | | | |
|---|---|---|---|---|---|
| 2003 | BAE07203 8 | 1 | 1.7 | 0.0 | |
| 2004 | AAS65617 27 AAS65616 24 ABE97722 23 ABE97721 23 | 100 | 5.0 | 0.3 | low p < .001, |
| | ABE97720 23 ABE97719 23 ABE97718 23 ABE97717 23 | | | | prev p < .001 |
| | ABE97716 23 ABE97715 23 ABE97714 23 ABE97713 23 | | | | |
| | ABE97712 23 AAS89006 18 AAS89005 16 AAV32637 24 | | | | |
| | ABL67796 18 ABL67783 18 ABL67772 18 AAV65827 18 | | | | |
| | ABE97692 23 ABE97711 23 ABE97710 23 ABE97709 23 | | | | |
| | ABE97708 23 ABE97707 23 ABE97706 23 ABE97705 23 | | | | |
| | ABE97704 23 ABE97703 23 ABE97702 23 ABE97701 23 | | | | |
| | ABE97700 23 ABE97699 23 ABE97698 23 ABE97697 23 | | | | |
| | ABE97696 23 ABE97695 23 ABE97694 23 ABE97693 23 | | | | |
| | ABE97691 23 ABE97690 23 ABE97689 23 ABE97688 23 | | | | |
| | ABE97687 23 ABE97686 23 ABE97685 23 ABE97684 23 | | | | |
| | ABE97683 23 ABE97682 23 ABE97681 23 ABE97680 23 | | | | |
| | ABE97679 23 ABE97678 23 ABE97677 23 ABE97676 23 | | | | |
| | ABE97675 23 ABE97674 23 ABE97673 23 ABE97672 23 | | | | |
| | ABE97671 23 ABE97670 23 ABE97669 23 ABE97668 23 | | | | |
| | ABE97667 23 ABE97666 23 ABE97665 23 ABE97664 23 | | | | |
| | ABE97663 23 ABE97662 23 ABE97661 23 ABE97660 23 | | | | |
| | ABE97659 23 ABE97658 23 ABE97657 23 ABE97656 23 | | | | |
| | ABE97655 23 ABE97654 23 ABE97653 23 ABE97652 23 | | | | |
| | ABE97651 23 ABE97650 23 ABE97649 23 ABE97648 23 | | | | |
| | ABE97647 23 ABE97646 23 ABE97645 23 ABE97644 23 | | | | |
| | ABE97643 23 ABE97642 23 ABE97641 23 ABE97640 23 | | | | |
| | ABE97639 23 ABE97638 23 ABE97637 23 ABE97636 23 | | | | |
| | ABE97635 23 AAV73978 8 AAV73976 8 AAV73973 18 | | | | |
| 2005 | ABC59832 6 ABB00581 8 ABL67829 18 ABL67818 18 | 18 | 3.0 | 0.8 | low p < .001, |
| | ABL67807 18 ABG78555 8 ABG78554 6 ABC72646 16 | | | | prev p < .001 |
| | ABC70166 8 ABB86286 8 ABF56651 27 ABI36097 13 | | | | |
| | ABI36095 13 ABI36094 13 ABI36085 13 ABI36084 13 | | | | |
| | ABI36014 13 ABD16286 20 | | | | |
| 2006 | ABG23658 12 ABI16506 13 ABG20474 7 ABG20470 8 | 51 | 2.8 | 0.4 | low p < .001, |
| | ABM68050 8 ABM68049 8 ABM68048 8 ABL31782 15 | | | | prev p < .20 |
| | ABL31768 13 ABL31757 13 ABL31746 13 ABI49417 13 | | | | |
| | ABI49398 13 ABL07032 12 ABL07021 15 ABL07010 15 | | | | |
| | ABI49409 13 ABI36476 13 ABI36465 13 ABI36457 13 | | | | |
| | ABI36446 13 ABI36435 13 ABI36426 13 ABI36413 13 | | | | |
| | ABI36402 13 ABI36391 13 ABI36380 13 ABI36369 13 | | | | |
| | ABI36358 13 ABI36347 13 ABI36336 13 ABI36325 13 | | | | |
| | ABI36314 13 ABI36298 13 ABI36287 13 ABI36278 13 | | | | |
| | ABI36200 13 ABI36189 13 ABI36179 13 ABI36168 13 | | | | |
| | ABI36157 13 ABI36146 13 ABI36096 13 ABI36093 13 | | | | |
| | ABI36092 13 ABI36090 13 ABI36089 11 ABI36088 11 | | | | |
| | ABI36087 13 ABI36086 13 ABI23981 7 | | | | |
| 2007 | ABO38180 8 ABM90546 13 ABM90535 13 ABM90524 13 | 13 | 3.0 | 0.5 | low p < .001, |
| | ABM90513 13 ABM90502 15 ABM90491 15 ABM90480 15 | | | | prev p < .05 |
| | ABM90469 15 ABM90458 15 ABM90447 15 ABM90436 15 | | | | |
| | ABQ43810 8 | | | | |

Human H5N1 Pb2 Area

| | | | | | |
|---|---|---|---|---|---|
| 2003 | BAE07198 18 BAE07197 18 | 2 | 2.4 | 0.0 | |
| 2004 | ABL67788 18 ABL67777 18 ABL67766 18 ABF01751 21 | 73 | 2.8 | 0.3 | low p < .001, |
| | ABF01750 21 ABF01749 21 ABF01748 21 ABF01747 21 | | | | prev p < .001 |
| | ABF01746 21 ABF01745 21 ABF01744 21 ABF01743 21 | | | | |
| | AAV35117 18 AAV32653 17 AAV32645 21 ABF01742 21 | | | | |
| | ABF01741 21 ABF01740 21 ABF01739 21 ABF01738 21 | | | | |
| | ABF01737 21 ABF01736 21 ABF01735 21 ABF01734 21 | | | | |
| | ABF01733 21 ABF01732 21 ABF01731 21 ABF01728 21 | | | | |
| | ABF01726 21 ABF01724 21 ABF01722 21 ABF01709 21 | | | | |
| | ABF01708 21 ABF01706 21 ABF01705 21 ABF01704 21 | | | | |
| | ABF01703 21 ABF01702 21 ABF01701 21 ABF01700 21 | | | | |
| | ABF01699 21 ABF01698 21 ABF01697 21 ABF01696 21 | | | | |
| | ABF01695 21 ABF01694 21 ABF01693 21 ABF01692 21 | | | | |
| | ABF01691 21 ABF01690 21 ABF01689 21 ABF01688 21 | | | | |
| | ABF01687 21 ABF01686 21 ABF01685 21 ABF01684 21 | | | | |
| | ABF01683 21 ABF01682 21 ABF01681 21 ABF01680 21 | | | | |
| | ABF01679 21 ABF01678 21 ABF01677 21 ABF01676 21 | | | | |
| | ABF01675 21 ABF01674 21 ABF01673 21 ABF01672 21 | | | | |
| | ABF01670 21 ABF01669 21 ABF01668 21 ABF01667 21 | | | | |
| | AAV73984 12 | | | | |
| 2005 | ABL67823 18 ABL67812 18 ABL67801 18 ABI36228 18 | 16 | 2.4 | 0.4 | low p > .50, |
| | ABI36227 18 ABI36223 18 ABI36218 18 ABI36213 18 | | | | prev p < .001 |
| | ABI36211 19 ABI36008 19 ABI35999 18 ABG78566 13 | | | | |
| | ABF56657 27 ABG78548 13 ABD16291 18 ABC72647 18 | | | | |
| 2006 | ABL31776 18 ABL31773 18 ABL31762 18 ABL31751 18 | 48 | 2.4 | 0.1 | low p > .50, |
| | ABL31740 18 ABI49392 18 ABL07026 18 ABL07015 18 | | | | prev p > .50 |
| | ABL07004 18 ABI49403 18 ABI36482 18 ABI36471 18 | | | | |
| | ABI36454 18 ABI36443 18 ABI36432 18 ABI36422 18 | | | | |
| | ABI36410 18 ABI36399 18 ABI36388 18 ABI36377 18 | | | | |
| | ABI36366 18 ABI36355 17 ABI36344 17 ABI36333 18 | | | | |
| | ABI36322 18 ABI36311 18 ABI36306 18 ABI36305 18 | | | | |
| | ABI36294 18 ABI36285 18 ABI36274 18 ABI36270 18 | | | | |
| | ABI36264 18 ABI36263 18 ABI36259 18 ABI36254 18 | | | | |
| | ABI36248 18 ABI36246 18 ABI36243 18 ABI36239 18 | | | | |
| | ABI36234 18 ABI36194 18 ABI36173 18 ABI36162 18 | | | | |
| | ABI36151 18 ABI36140 18 ABG23659 21 ABI16501 18 | | | | |

human H5N1 matrix area

| | | | | | |
|---|---|---|---|---|---|
| 2003 | BAE07204 3 | 1 | 1.2 | 0.0 | prev p < .05 |
| 2004 | AAV35110 3 AAV32646 3 AAV32638 3 AAV35111 2 | 7 | 1.6 | 0.4 | low p < .04 |
| | AAV32647 2 AAV32639 2 AAV73981 3 | | | | |
| 2005 | ABF01926 3 ABF01924 3 ABF01922 3 ABF01920 3 | 198 | 1.6 | 0.7 | low p < .001, |
| | ABF01918 3 ABF01916 3 ABF01914 3 ABF01912 3 | | | | prev p > .50 |
| | ABF01910 3 ABF01908 3 ABF01906 3 ABF01927 2 | | | | |
| | ABF01925 2 ABF01923 1 ABF01921 2 ABF01919 2 | | | | |
| | ABF01917 2 ABF01915 2 ABF01913 2 ABF01911 2 | | | | |
| | ABF01909 2 ABF01907 2 ABG78552 3 ABG78551 3 | | | | |
| | ABG20477 3 ABF56649 3 ABI36082 5 ABI36080 3 ABI36060 | | | | |
| | 5 ABI36058 3 ABI36015 3 ABI36004 3 ABF01904 3 | | | | |
| | ABF01902 3 ABF01900 3 ABF01898 3 ABF01896 3 | | | | |
| | ABF01894 3 ABF01892 3 ABF01890 3 ABF01888 3 | | | | |
| | ABF01886 3 ABF01884 3 ABF01882 3 ABF01880 3 | | | | |
| | ABF01878 3 ABF01876 3 ABF01874 3 ABF01872 3 | | | | |
| | ABF01870 3 ABF01868 3 ABF01866 3 ABF01864 3 | | | | |
| | ABF01862 3 ABF01860 3 ABF01858 3 ABF01856 3 | | | | |
| | ABF01854 3 ABF01852 3 ABF01850 3 ABF01848 3 | | | | |
| | ABF01846 3 ABF01844 3 ABF01842 3 ABF01840 3 | | | | |
| | ABF01838 3 ABF01836 3 ABF01834 3 ABF01832 3 | | | | |
| | ABF01830 3 ABF01828 3 ABF01826 3 ABF01824 3 | | | | |
| | ABF01822 3 ABF01820 3 ABF01818 3 ABF01816 3 | | | | |
| | ABF01814 3 ABF01812 3 ABF01810 3 ABF01808 3 | | | | |
| | ABF01806 3 ABF01804 3 ABF01802 3 ABF01800 3 | | | | |
| | ABF01798 3 ABF01796 3 ABF01794 3 ABF01792 3 | | | | |
| | ABF01790 3 ABF01788 3 ABF01786 3 ABF01784 3 | | | | |
| | ABF01782 3 ABF01780 3 ABF01778 3 ABF01776 3 | | | | |
| | ABF01774 3 ABF01772 3 ABF01770 3 ABF01768 3 | | | | |
| | ABF01766 3 ABF01764 3 ABF01762 3 ABF01760 3 | | | | |
| | ABF01758 3 ABF01756 3 ABF01754 3 ABF01752 3 | | | | |
| | ABD16285 3 ABC72651 3 ABF56650 2 ABI36083 2 | | | | |
| | ABI36081 4 ABI36061 2 ABI36059 4 ABI36016 4 ABI36005 4 | | | | |
| | ABF01905 2 ABF01903 2 ABF01901 1 ABF01899 2 | | | | |
| | ABF01897 2 ABF01895 2 ABF01893 2 ABF01891 2 | | | | |
| | ABF01889 2 ABF01887 2 ABF01885 2 ABF01883 1 | | | | |
| | ABF01881 1 ABF01879 2 ABF01877 2 ABF01875 2 | | | | |
| | ABF01873 2 ABF01871 2 ABF01869 2 ABF01867 2 | | | | |
| | ABF01865 2 ABF01863 2 ABF01861 1 ABF01859 2 | | | | |
| | ABF01857 2 ABF01855 2 ABF01853 2 ABF01851 2 | | | | |
| | ABF01849 2 ABF01847 2 ABF01845 2 ABF01843 2 | | | | |
| | ABF01841 2 ABF01839 2 ABF01837 2 ABF01835 2 | | | | |
| | ABF01833 2 ABF01831 1 ABF01829 2 ABF01827 1 | | | | |
| | ABF01825 2 ABF01823 2 ABF01821 2 ABF01819 2 | | | | |
| | ABF01817 2 ABF01815 2 ABF01813 2 ABF01811 2 | | | | |
| | ABF01809 2 ABF01807 2 ABF01805 2 ABF01803 2 | | | | |
| | ABF01801 2 ABF01799 2 ABF01797 2 ABF01795 1 | | | | |
| | ABF01793 1 ABF01791 4 ABF01789 2 ABF01787 2 | | | | |
| | ABF01785 4 ABF01783 2 ABF01781 1 ABF01779 2 | | | | |
| | ABF01777 2 ABF01775 1 ABF01773 2 ABF01771 2 | | | | |
| | ABF01769 4 ABF01767 2 ABF01765 2 ABF01763 1 | | | | |
| | ABF01761 1 ABF01759 1 ABF01757 1 ABF01755 4 | | | | |
| | ABF01753 2 ABC72652 2 ABG78553 1 ABG78550 1 | | | | |
| 2006 | ABG23663 3 ABI16508 3 ABG20473 3 ABG20469 3 | 93 | 2.0 | 0.7 | low p < .001, |
| | ABG23664 2 ABL31783 5 ABL31769 5 ABL31758 5 | | | | prev p < .001 |
| | ABL31747 5 ABI49418 5 ABI49399 5 ABL07033 5 ABL07022 | | | | |
| | 5 ABL07011 5 ABI36062 5 ABI49410 5 ABI36483 5 | | | | |
| | ABI36474 5 ABI36463 5 ABI36455 5 ABI36444 5 ABI36433 5 | | | | |
| | ABI36424 3 ABI36411 3 ABI36400 5 ABI36389 5 ABI36378 5 | | | | |
| | ABI36367 3 ABI36356 3 ABI36345 3 ABI36334 3 ABI36323 3 | | | | |
| | ABI36312 5 ABI36296 5 ABI36276 5 ABI36201 5 ABI36190 3 | | | | |
| | ABI36180 3 ABI36169 3 ABI36158 3 ABI36147 3 ABI36078 3 | | | | |
| | ABI36076 3 ABI36074 3 ABI36070 5 ABI36068 5 ABI36066 5 | | | | |
| | ABI36064 5 ABI23980 3 ABL31784 2 ABL31770 2 ABL31759 | | | | |
| | 2 ABL31748 2 ABI49419 2 ABI49400 2 ABL07034 2 | | | | |
| | ABL07023 2 ABL07012 2 ABI36063 2 ABI49411 2 ABI36484 | | | | |
| | 2 ABI36475 2 ABI36464 2 ABI36456 2 ABI36445 2 ABI36434 | | | | |
| | 2 ABI36425 2 ABI36412 2 ABI36401 2 ABI36390 2 ABI36379 | | | | |
| | 2 ABI36368 2 ABI36357 4 ABI36346 4 ABI36335 4 ABI36324 | | | | |
| | 4 ABI36313 2 ABI36297 2 ABI36277 2 ABI36202 2 ABI36191 | | | | |
| | 2 ABI36181 2 ABI36170 2 ABI36159 2 ABI36148 2 ABI36079 | | | | |
| | 4 ABI36077 4 ABI36075 4 ABI36071 2 ABI36069 2 ABI36067 | | | | |
| | 2 ABI36065 2 ABI16507 2 | | | | |

Human H5N1 Nucleocapsid Area

| | | | | | |
|---|---|---|---|---|---|
| 2004 | ABL67795 2 ABL67782 2 ABL67771 2 AAV35112 2 | 4 | 0.4 | 0.0 | |
| 2005 | ABL67828 2 ABL67817 2 ABL67806 2 ABI36110 2 ABI36109 | 10 | 0.4 | 0.0 | low p < .001, |
| | 2 ABI36108 2 ABI36099 2 ABI36098 2 ABI36013 2 ABI36003 2 | | | | prev p > .50 |
| 2006 | ABL31781 2 ABL31767 2 ABL31756 2 ABL31745 2 | 43 | 0.4 | 0.0 | low p < .001, |
| | ABI49416 2 ABI49397 2 ABL07031 2 ABL07020 2 ABL07009 | | | | prev p > .50 |
| | 2 ABI49408 2 ABI36477 2 ABI36466 2 ABI36458 2 ABI36447 | | | | |
| | 2 ABI36436 2 ABI36427 2 ABI36414 2 ABI36403 2 ABI36392 | | | | |
| | 2 ABI36381 2 ABI36370 2 ABI36359 2 ABI36348 2 ABI36337 | | | | |
| | 2 ABI36326 2 ABI36315 2 ABI36299 2 ABI36288 2 ABI36279 | | | | |
| | 2 ABI36199 2 ABI36188 2 ABI36178 2 ABI36167 2 ABI36156 | | | | |
| | 2 ABI36145 2 ABI36107 2 ABI36106 2 ABI36105 2 ABI36104 | | | | |
| | 2 ABI36103 2 ABI36102 2 ABI36101 2 ABI36100 2 | | | | |

[0244] Analysis of the number of Replikin sequences present in the areas in the genome adjacent to the pB1 area revealed no more than a two-fold increase in Replikin Count in the seven other areas of the genome as compared to an eight-fold increase (p<0.001) in the Replikin Count in the pB1 area between years 2003 to 2006. The specificity of the localization of the upregulated RPG in the pB1 area is underlined by the fact that other parts of the polymerase gene area of which pB1 is a part, namely, the pB2 and pA gene areas do not have the same amount of increase in Replikin Count even though the gene areas are immediately adjacent to pB1.

[0245] In the illustration, the standard deviation of the means is shown in light gray columns on top of the means, rather than in the usual ‘T’ symbols, to emphasize the diverse expanding virus population with regard to the Replikin Count. As Replikin Count increases in a population, a diversity of Replikin Counts may be observed as the lethality and virulence of the virus increases. An increasing standard deviation within a virus population is, therefore, itself an index of viral outbreaks. Here in FIG. 1 and in the figures that follow, small standard deviations from mean Replikin Count are seen to accompany quiescent inter-outbreak periods of the virus.

[0246] Examples 1-3 are provided below as examples of analysis of Replikin Peak Genes in sequences publicly available in accession numbers at PubMed. Examples 2 and 3 illustrate how identification of a Replikin Peak Gene allows for a magnification of the effect of increases in Replikin Count in an isolate where the increase may be correlated with and predict increases in virulence and lethality. For example, Example 2 provides a 2003 isolate of H5N1 from Hong Kong with a whole pB1 gene area (SEQ ID NO: 1683) Replikin Count of 2.0 and an RPG Replikin Count of 14.6. Example 3 provides a 2006 isolate from Indonesia with a whole pB1 gene area Replikin Count of 17.8 and an RPG Replikin Count of 22.5. Indonesia experienced a highly lethal outbreak of H5N1 with evidence of human to human transmission in 2007. The high Replikin Counts in isolates from Indonesia in 2006 allowed the inventors to prospectively predict the lethal Indonesian outbreak.

[0247] The Replikin count of the whole genome from the 2006 Indonesian isolate demonstrates a significant increase as compared to the 2003 Hong Kong isolate. The isolation of the Replikin peak gene (RPG) area, that is the area of the genome which shows the highest concentration (count) of continuous Replikins per 100 amino acids, magnifies the effect. For this reason, whole genome counts are used for first approximations of Replikin count increases, and where more detailed specific gene areas or open reading frame data is not available. However, when available, the RPG is used for more definitive “higher power” examinations. This is illustrated in FIGS. 1-4.

[0248] B. Increasing Replikin Count in RPG of Influenza A Associated with Pandemics and Lethality

[0249] The inventors have now associated an increase in Replikin Count in the RPG of Influenza A virus with pandemics, epidemics and lethal outbreaks of influenza. FIG. 2 illustrates an increase in Replikin Count before and accompanying each Influenza A pandemic and outbreak since 1918 and low Replikin Counts during quiescent periods of Influenza A infection and continually in non-lethal Influenza B. The graph provides annual Replikin Counts from 1917-2007 for all Replikin Peak Genes isolated in silico in the pB1 gene area of influenza strains having amino acid or nucleic acid sequences publicly available at PubMed. The total number of sequences analyzed for the data is 14,227. The Replikin Count of each influenza-in-silico isolate was obtained separately and objectively through time for each species by computer software (FluForecast®, available through Replikins LLC, Boston, Mass.). The software queried publicly available sequences at www.pubmed.com. The software measures solely the number of Replikins per 100 amino acids in the publicly available sequences and provides a mean Replikin Count with standard deviation from the mean for all isolates available in a given strain of influenza in a given year.

[0250] Over a ninety year period, the graph in FIG. 2 demonstrates an increase in Replikin Count before and accompanying each Influenza A pandemic and outbreak, namely, the 1918 H1N1 pandemic, the 1930's H1N1 epidemic, the 1957H2N2 pandemic, the 1968H3N1 pandemic, the 1977-78H3N2 outbreaks and the H5N1 outbreaks of 1997, 2001-2004 and 2007. In FIG. 2, p values at <0.001 are supportive of the significance of the differences between the pandemic and epidemic groups on the one hand and clinically quiescent periods on the other hand.

[0251] Over the same ninety year period, constant low Replikin Counts of less than four may be observed during quiescent non-lethal periods between epidemic outbreaks in all 3 pandemic strains of Influenza A including H1N1, H2N2, H3N2 and low Replikin Counts of less than four may also be observed in human H5N1 and H5N1 in chicken in relatively quiescent periods. Low Replikin Counts may likewise be observed in non-lethal Influenza B through the entire period of observation. In particular, the absence of increase in Replikin Count above five in Influenza B corresponds to the absence of any observed lethal outbreak. As such, during the observation period, Influenza B is always non-lethal. This absence of Replikin Counts of five or more in non-lethal Influenza B provides an important control for the study of Replikin Count as a correlate of lethality. In Influenza A, an increase in Replikin Count indicates an increase in lethality and a decrease in Replikin Count indicates a decrease in lethality.

[0252] Analysis of publicly available sequences for isolates of Influenza B virus between 1940 and 2007 is provided below in Table 2. Years in which not data was available are not included in the table.

TABLE 2
Influenza B

| | | | Mean | | |
|---|---|---|---|---|---|
| | | No. of | Replikin | | |
| | | Isolates | Count | | |
| | | per | per | | |
| Year | PubMed Accession Number-Replikin Count | year | year | S.D. | Significance |
| 1940 | NP_056657 14 ABG85176 14 ABG85165 14 P07832 14 | 10 | 1.8 | 0.3 | low p < .001 |
| | BAA00002 14 AAA43767 14 AAF06886 16 AAF06851 10 | | | | |
| | NP_056659 16 NP_056658 10 | | | | |
| 1966 | AAF89738 25 P13872 14 P13871 14 Q9IMP4 25 | 4 | 2.6 | 0.8 | low p < .10 |
| 1969 | ABQ81851 14 | 1 | 1.9 | 0.0 | prev p < .10 |
| 1972 | ABF21251 18 ABF21252 18 | 2 | 2.4 | 0.0 | |
| 1979 | AAF06873 14 AAF06856 10 | 2 | 1.6 | 0.4 | low p < .05, |
| | | | | | prev p < .10 |
| 1984 | AAF06870 14 AAF06888 16 AAF06853 10 | 3 | 1.8 | 0.5 | low p < .02, |
| | | | | | prev p > .50 |
| 1985 | AAF06868 14 AAF06885 16 AAF06850 10 | 3 | 1.8 | 0.5 | low p < .02, |
| | | | | | prev p > .50 |
| 1987 | ABL77253 14 AAF06874 17 AAF06891 14 AAF06857 10 | 4 | 1.8 | 0.4 | low p < .002, |
| | | | | | prev p > .50 |
| 1988 | ABN50611 14 ABL77264 14 AAF06875 14 AAF06860 14 | 9 | 1.8 | 0.3 | low p < .001, |
| | AAF06892 17 AAF06877 14 AAF06858 10 AAF06842 10 | | | | prev p > .50 |
| | P12236 6 | | | | |
| 1989 | ABL77275 14 P21796 5 | 2 | 1.8 | 0.1 | low p < .01, |
| | | | | | prev p > .50 |
| 1990 | ABN58670 16 ABN50633 14 ABN50622 14 ABL76703 14 | 6 | 1.9 | 0.1 | low p < .001, |
| | AAB72043 14 O36430 14 | | | | prev p < .20 |
| 1991 | ABN50644 27 ABN51204 10 ABN51193 10 ABL77286 14 | 4 | 2.0 | 1.1 | low p < .05, |
| | | | | | prev p > .50 |
| 1992 | ABN50655 14 ABL77308 14 ABL77297 14 | 3 | 1.9 | 0.0 | prev p > .50 |
| 1993 | CAA05486 40 ABN50666 14 ABL77341 14 ABL77330 14 | 15 | 2.1 | 1.0 | low p < .001, |
| | ABL77319 14 AAF06869 14 AAF06865 14 AAF06861 14 | | | | prev < .40 |
| | CAG96502 14 AAF06887 17 AAF06882 14 AAF06878 17 | | | | |
| | AAF06852 10 AAF06846 10 AAF06843 10 | | | | |
| 1994 | AAU94857 14 AAU94856 14 AAU94855 14 AAU94854 14 | 29 | 1.8 | 0.2 | low p < .001, |
| | AAU94853 14 AAU94852 14 AAU94851 14 AAU94850 14 | | | | prev p < .40 |
| | AAU94849 14 AAU94848 14 AAU94847 14 AAU94846 14 | | | | |
| | AAU94845 14 AAF89734 14 ABR16004 14 ABN50721 14 | | | | |
| | ABN50710 14 ABN50699 14 ABN50688 14 ABN50677 14 | | | | |
| | ABL77363 14 ABL77352 14 ABL77000 14 AAF06866 15 | | | | |
| | AAF06864 14 AAF06883 17 AAF06881 14 AAF06848 10 | | | | |
| | AAF06847 10 | | | | |
| 1995 | ABR16015 14 ABN50732 14 ABL77385 14 ABL77374 14 | 5 | 1.9 | 0.0 | prev p > .50 |
| | ABL76945 14 | | | | |
| 1996 | ABL76967 14 ABL76714 14 | 2 | 1.9 | 0.0 | |
| 1997 | ABN59454 14 ABN50413 14 ABN50402 14 ABN50391 14 | 20 | 1.8 | 0.2 | low p < .001, |
| | ABL76978 14 ABL76285 14 ABL76274 14 ABL76263 14 | | | | prev p > .50 |
| | AAK95906 14 AAF06867 14 AAF06862 14 CAG96500 14 | | | | |
| | ABI96727 14 ABI96738 13 AAP22114 14 AAP22106 14 | | | | |
| | AAF06884 17 AAF06879 17 AAF06849 10 AAF06844 10 | | | | |
| 1998 | ABN50743 14 ABN50512 14 ABN50457 14 ABL77022 14 | 23 | 1.8 | 0.3 | low p < .001, |
| | ABL77011 14 ABL76989 14 ABL76956 14 ABL76780 14 | | | | prev p > .50 |
| | ABL76769 14 ABL76296 14 AAF06876 14 AAF06872 14 | | | | |
| | AAF06871 14 AAF06863 14 AAU00993 14 AAF06893 17 | | | | |
| | AAF06890 17 AAF06889 17 AAF06880 17 AAF06859 10 | | | | |
| | AAF06855 10 AAF06854 10 AAF06845 10 | | | | |
| 1999 | ABL77055 14 ABL77044 14 ABL77033 14 ABL76813 14 | 14 | 1.9 | 0.2 | low p < .001, |
| | ABL76802 14 ABL76362 14 ABL76351 14 ABL76340 14 | | | | prev p < .40 |
| | ABL76329 14 ABL76318 14 ABL76307 14 ABQ81840 14 | | | | |
| | CAG96499 14 ABI94772 20 | | | | |
| 2000 | ABL77110 14 ABL77066 14 ABL76901 14 ABL76890 14 | 15 | 1.9 | 0.0 | low p < .001, |
| | ABL76879 14 ABL76868 14 ABL76857 14 ABL76824 14 | | | | prev p < .30 |
| | ABL76791 14 ABL76395 14 ABL76384 14 ABL76373 14 | | | | |
| | ABL84349 14 CAG96513 14 AAT69423 14 | | | | |
| 2001 | ABR15982 14 ABO72385 14 ABN50600 14 ABN50567 14 | 26 | 2.0 | 0.3 | low p < .001, |
| | ABN50534 14 ABN50523 14 ABN50490 14 ABN50479 14 | | | | prev p < .05 |
| | ABN50435 14 ABN50424 14 ABL77187 14 ABL77143 14 | | | | |
| | ABL77099 14 ABL77088 14 ABL77077 14 ABL76417 14 | | | | |
| | ABL76406 14 AAT69445 14 CAG96504 14 AAT69434 14 | | | | |
| | CAG96509 14 ABJ09524 14 ABJ09472 15 ABJ15707 16 | | | | |
| | ABI96775 20 ABI96695 16 | | | | |
| 2002 | ABN50754 14 ABN50578 14 ABN50556 14 ABN50545 14 | 32 | 2.0 | 0.3 | low p < .001, |
| | ABL77396 14 ABL77176 14 ABL77165 14 ABL77154 14 | | | | prev p > .50 |
| | ABL77132 14 ABL76483 14 ABL76472 14 ABL76461 14 | | | | |
| | ABL76450 14 ABL76439 10 ABL76428 14 CAG96515 14 | | | | |
| | CAG96514 14 CAG96511 14 CAG96510 14 CAG96503 14 | | | | |
| | CAG96501 14 ABI97312 16 ABJ09504 17 ABJ09486 15 | | | | |
| | ABI98925 16 ABI96765 15 ABK00110 15 ABI97340 15 | | | | |
| | ABI97331 21 ABI97322 21 ABI94786 14 ABI94737 11 | | | | |
| 2003 | ABR15993 14 ABN50589 14 ABL77209 14 ABL77198 14 | 39 | 1.9 | 0.2 | low p < .001, |
| | ABL76835 14 ABL76626 14 ABL76615 14 ABL76604 14 | | | | prev p < .10 |
| | ABL76593 14 ABL76582 14 ABL76571 14 ABL76560 14 | | | | |
| | ABL76549 14 ABL76538 14 ABL76527 14 ABL76516 14 | | | | |
| | ABL76505 14 ABL76494 14 CAG96520 14 CAG96519 14 | | | | |
| | CAG96517 14 CAG96512 14 CAG96508 14 CAG96507 14 | | | | |
| | CAG96506 14 CAG96505 14 ABJ98940 16 ABJ09534 15 | | | | |
| | ABJ09509 15 ABJ09482 15 ABI98936 14 ABI98912 15 | | | | |
| | ABI98908 15 ABK00142 16 ABK00088 8 ABJ80591 8 | | | | |
| | ABJ52572 8 ABJ52553 16 ABI97342 14 | | | | |
| 2004 | ABN50468 14 ABL77231 14 ABL77220 14 ABL77121 14 | 20 | 1.8 | 0.1 | low p < .001, |
| | ABL76923 14 ABL76912 14 ABL76846 14 ABL76758 14 | | | | prev p < .30 |
| | ABL76637 14 CAG96518 14 CAG96516 10 AAT70178 14 | | | | |
| | ABJ16471 15 ABJ09543 14 AAT78590 14 ABK00130 15 | | | | |
| | ABJ52559 14 ABJ15718 15 ABI97302 13 ABI96707 13 | | | | |
| 2005 | ABN50501 14 ABN50446 14 ABL77242 14 ABL76934 14 | 10 | 1.9 | 0.1 | low p < .001, |
| | ABL76692 14 ABL76681 14 ABL76670 14 ABL76659 14 | | | | prev p < .20 |
| | ABL76648 14 ABI96712 14 | | | | |
| 2006 | ABL76747 14 ABL76736 14 ABL76725 14 ABR16026 14 | 4 | 1.9 | 0.0 | low p < .001, |
| | | | | | prev p < .30 |
| 2007 | ZP_01998985 50 EDN71014 50 | 2 | 3.1 | 0.0 | prev p < .001 |

[0253] While the Replikin Count in non-lethal Influenza B remains remarkable constant, the Replikin Count in Influenza A shows significant variation that correlates with outbreaks, epidemics and pandemics. For example, mean Replikin Count of the RPG in FIG. 2 may be observed to be greater in the 1918 (H1N1) pandemic than in the 1957 (H2N2) and 1968 (H3N2) pandemics in approximate scale to the mortality rates observed in those three pandemics. The 1918 pandemic is thought to have resulted in 675,000 deaths in the U.S. and 50 million deaths globally. A Replikin Count of 19 in 1917 may be observed in FIG. 2. The 1957 pandemic is thought to have resulted in 70,000 deaths in the U.S. and 1-2 million deaths globally. A Replikin Count of 4 in 1957 with a standard deviation of 4.9 may be observed in FIG. 2. The 1968 pandemic is thought to have resulted in 34,000 deaths in the U.S. with 700,000 deaths globally. A Replikin Count of 7.2 in 1968 with a standard deviation of 8 may be observed in FIG. 2.

[0254] The dominance of H5N1 over other Influenza A strains between 1990 and 2007 is also evident in FIG. 2. This dominance in mean Replikin Count is reflected in high global lethality in birds during that time period and outbreaks resulting in human lethality in 1997, 2001-2004 and continuing lethality and possible human-to-human transmission in 2007. The counts for human H5N1 in 2004 through 2007 are increasing and approaching the mean Replikin Count level of the 1918 H1N1 pandemic. The mean Replikin Count of the RPG in chicken H5N1 is also observed to increase to a lesser degree over this time period and observed to decrease in 2007. The standard deviation of the means (SD) for all strains is shown in light grey columns with caps, on top of the column for the mean Replikin count, and emphasizes the broad distribution of Replikin Counts in the RPG of the expanding virus population. This broad distribution of Replikin Counts illustrates rapid changes in distribution of Replikin Counts during the rapid replication that is associated with virus outbreaks. During quiescent periods, the standard deviation is observed to be approximately 10% or less of the mean. In contrast, when an outbreak develops, the standard deviation is observed to be 50% or greater than the mean (the same phenomenon is observed in FIG. 7 for H3N8 equine encephalitis). The data for mean Replikin Count in human H5N1 for 2005, 2006 and 2007 suggest that the current epidemic is not over. For example, in each of the H1N1, H2N2 and H3N2 pandemics, a decline may be observed in Replikin Count prior to the end of the outbreak. This decline prior to end of an outbreak was also seen in the SARS outbreak of 2003. See FIG. 9. As such, since observed mean Replikin Count has not yet begun to decline in H5N1, the current epidemic is expected to continue.

[0255] FIG. 3 illustrates successive “emerging” strains of influenza virus between 1930 and 2007. Mean Replikin Counts per year of isolation of various strains of influenza are provided for the polymerase area (marked with circles), the pB1 area (marked with triangles), and the pB1-F2 area (marked with squares). Data for H1N1 and H3N2 continue through 2007. Gaps represent years where no data was available on these genomic areas on PubMed.

[0256] Dramatic increases in Replikin Count may be observed just before outbreak in the rebound epidemic of H1N1 beginning in the 1930's, in the pandemics of H2N2 and H2N3, which occurred in 1957 and 1968, respectively, and the outbreaks of H5N1 between 1997 and 2007. The largest increase in Replikin Count may be observed in the pB1-F2 area of the genome, which is contained within the pB1 area of the genome and contains an identified RPG (e.g., SEQ ID NO: 1723). The next largest increase in Replikin Count may be observed in the pB1 area of the genome, which is contained in the polymerase area of the genome. The smallest increase in Replikin Count may be observed in the polymerase area of the genome. It may be observed, therefore, that the Replikin Count becomes magnified as measured within the pB1 area as compared to the polymerase area and within the pB1-F2 area as compared to the pB1 area.

[0257] As in FIG. 2, FIG. 3 illustrate the constancy of Replikin Counts during quiescent periods of the strain, and a marked increase in Replikin Peak Gene Replikin Counts one year in advance of, or simultaneous with, outbreaks of specific strains. FIGS. 2 and 3 demonstrate that neither increases in Replikin Count nor outbreaks occur in more than one influenza strain at the same time. The figures further demonstrate a “rise” of H3N2 in 1968 that occurs simultaneous with a “fall” of H2N2.

[0258] C. Replikin Count in RPG of H5N1 Directly Correlates with Human Mortality

[0259] The inventors have now demonstrated that increased Replikin Counts in the RPG of H5N1 influenza virus (e.g., SEQ ID NO: 1684) may be directly correlated with human mortality. FIG. 4 illustrates the relationship of Replikin Count of the Replikin Peak Gene in human H5N1 to percent human mortality between 2003 and 2007 in human cases of H5N1 infection. An increase in Replikin Count in the Replikin Peak Gene of H5N1 is observed to be quantitatively related to higher mortality in the host. The Replikin Peak Gene in human H5N1 is the pB1 gene area, which has the highest concentration of continuous Replikin sequences in publicly available sequences of the H5N1 genome.

[0260] Magnification of Replikin Count may be observed in FIG. 4 when the mean Replikin Count in the whole virus a given year is compared with the mean Replikin Count in the pB1 gene area (identified as the Replikin Peak Gene area of the virus). For example, annual mean Replikin Count in the whole genome increased 33% from 2005 to 2007 while annual mean Replikin Count in the Replikin Peak Gene (pB1 gene area) increased nine-fold from 2003 to 2007 and 222% from 2005 to 2007 with a statistical p value less than 0.001. Annual percent mortality of human H5N1 cases increased approximately 100% from 2005 to 2007. The 2007 data, while unfortunately sparse because of withholding of data by some countries, does not indicate a decrease in whole genome Replikin count or in RPG Replikin Count. A significant decrease in Replikin Count would typically signal the end of an outbreak or epidemic. See, e.g., SARS coronavirus data in FIG. 9. No such decrease has yet to be observed.

[0261] FIGS. 16 and 17 likewise demonstrate that increased Replikin Counts in the RPG of H5N1 is more strongly correlated with lethality in a given year than increased Replikin Counts in other portions of the H5N1 genome. The data for FIGS. 16 and 17 are contained in Table 3 below.

TABLE 3
H5N1 Replikin Concentration and Human Mortality

| | 2003 | 2004 | 2005 | 2006 | 2007 |
|---|---|---|---|---|---|
| H5N1 Whole Virus Replikin Count in Humans | 2.2 +/− 1.2 | 2.4 +/− 1.4 | 2.3 +/− 2.6 | 3.8 +/− 4.6 | 3.7 +/− 4.5 |
| H5N1 Polymerase Replikin Count in Humans | 2.6 +/− 0.8 | 2.9 +/− 0.9 | 4.8 +/− 5.0 | 7.4 +/− 7.0 | 7.3 +/− 6.7 |
| H5N1 pB1 gene area (RPG) Replikin Count in Humans | 2.0 +/− 0 | 2.0 +/− 0.1 | 8.0 +/− 7.7 | 16.1 +/− 5.7 | 15.4 +/− 5.9 |
| H5N1 pB2 gene area Replikin Count in Humans | 2.4 +/− 0 | 2.8 +/− 0.3 | 2.4 +/− 0.4 | 2.4 +/− 0.1 | 2.4 +/− 0.3 |
| H5N1 pA gene area Replikin Count in Humans | 3.8 +/− 0 | 4.0 +/− 0.6 | 3.8 +/− 0.4 | 3.8 +/− 0.3 | 4.2 +/− 0.3 |
| H5N1 Human Mortality Percent | | | 45 | 69 | 85 |

[0262] In FIG. 16, a correlation was established between human mortality and (1) mean concentration of Replikin sequences in the whole genome, (2) mean concentration of Replikin sequences in the polymerase gene, and (3) mean concentration of Replikin sequences in the Replikin Peak Gene (pB1 gene area) of H5N1 influenza strains. As Replikin concentration increased by these three measures, human mortality was observed to increase. However, while all three measures provided a correlation with human mortality, changes in the Replikin Count in the polymerase gene correlated more significantly with human mortality, and changes in the Replikin Count in the Replikin Peak Gene (pB1 gene area) of the H5N1 genome correlated still more significantly with human mortality. FIG. 16 suggests, therefore, that identification of Replikin Peak Genes within viral genomes improves identification and prediction of virulence and mechanisms of virulence using Replikin concentration data.

[0263] FIG. 17 illustrates a significant eight-fold increase in Replikin concentration in the pB1 gene area (Replikin Peak Gene) of isolates of H5N1 while no significant increase is observed in neighboring gene areas of the pB1 gene area, namely, the pA gene area and the pB2 gene area. FIG. 17 illustrates a significant correlation between human mortality and the Replikin Peak Gene (pB1 gene area) of isolates of H5N1 influenza virus. No correlation is observed in neighboring gene areas of the pB1 gene area, namely the pB2 and pA gene areas. In addition to the correlative aspect of the increase in Replikin concentration being related to percent mortality, FIG. 17 provides strong confirmation of the power and validity of the methodology of predicting changes in virulence and outbreaks of virus by monitoring changes in Replikin concentration.

[0264] Table 3 provides mortality data for H5N1 infections from 2005 through 2007 and does not include earlier mortality data. Mortality data prior to 2005 has not been included in Table 3 because data prior to 2005 is inconsistent and understood by those of skill in the art to contain errors including errors caused by underreporting. The first generally agreed occasion when there were human deaths caused by proven H5N1 infection was in Hong Kong in 1997-1998. (This is probably incorrect, however, since there probably was mortality between 1959, when H5N1 was first reported, and 1997). The usual figures cited for 1997 are: 30 human cases, 8 deaths with mortality rate of about 27%. The number of cases (morbidity) and the number who died (mortality) that were not reported is unknown, but suspected to be significant. These errors are usually high in geographic areas where the medical care is less structured and scientific and the reporting is incomplete. Press reports between 1998 and 2002 were few, scattered, and not in agreement. Mortality data between 2005 and 2007 appear to be more consistent and have a higher level of reliability. Table 3, therefore, contains data from these years.

[0265] D. Replikin Count in RPG Correctly Identifies Host Lethality and Geographic Location of Outbreaks

[0266] The inventors have now demonstrated that Replikin Count in a Replikin Peak Gene provides a method for predicting and identifying outbreaks of pathogens such as H5N1 influenza by host and by geographic area. FIG. 5 demonstrates the predictive capacity for identifying outbreaks in particular hosts and FIG. 6 demonstrates the predictive capacity for identifying the lethality of an outbreak in a particular geographic area. The data for FIGS. 5 and 6 are contained in Table 4 below.

TABLE 4
Host and Geographic Predictions
(Replikin Count and Standard Deviation)

| | Goose | Chicken | Duck | Human | Japan | Russia | Egypt | China | Vietnam | Thailand | Indonesia |
|---|---|---|---|---|---|---|---|---|---|---|---|
| 2003 | No | 2 ± 1.1 | 2.1 ± 1.1 | 2.2 ± 1.2 | 2 ± 0 | No | No | 1.9 ± 0.3 | No | 1.9 ± 0.2 | No data |
| | data | | | | | data | data | | data | | |
| 2003 | No | 3 ± 1.5 | 3.8 ± 1.8 | 3.3 ± 1.3 | 2 ± 0 | No | No | 2 ± 0.1 | 2 ± 0.2 | 2 ± 0.2 | 2 ± 0 |
| | data | | | | | data | data | | | | |
| 2005 | 2.6 ± 1.2 | 3.2 ± 2.8 | 4 ± 5 | 3.7 ± 4.1 | 2.1 ± 0.1 | 2 ± 0.1 | No | 2.7 ± 0.5 | 3 ± 0.2 | 4.1 ± 4.7 | 3.9 ± 3.6 |
| | | | | | | | data | | | | |
| 2006 | 2.5 ± 1.2 | 3.2 ± 3.1 | 2.7 ± 1.6 | 5 ± 5.7 | 2 ± 0 | 2 ± 0 | 2 ± 0 | 3 ± 0.2 | No | 6.7 ± 6.7 | 16.7 ± 4.9 |
| | | | | | | | | | data | | |

[0267] Increased Replikin Counts in pathogens in particular hosts is predictive of an increase in probability of an outbreak of the pathogen. For example, FIG. 5 illustrates a 2005 through 2007 upregulation of human H5N1 in humans as compared to H5N1 in goose, duck and chicken. Replikin analysis was performed separately for H5N1 Replikin Peak Genes of each host group, namely, goose, duck, chicken and human. Low levels of Replikin Count, below 4, were observed in each host group until 2005-2006, when epidemics increased in Asian countries. While duck H5N1 counts decreased in 2006, Replikin Counts continued to increase in chicken H5N1 in 2006. Human RPG activity was upregulated in 2005-2006 and overtook RPG activity in chickens. This transition of increased Replikin Count from duck to chicken to human is in agreement with epidemiological evidence of the order of transfer of the virus between hosts. Changes in Replikin Count in the Replikin Peak Gene of the H5N1 isolates in FIG. 5 allows for identification of those hosts in which the influenza virus strain is more virulent than other hosts.

[0268] Increased Replikin Counts in pathogens in particular geographic areas is predictive of an increase in lethality of the pathogen in the identified geographic area. For example, FIG. 6 illustrates localization of human H5N1 isolates having the highest lethality by measuring mean Replikin Counts in isolates of human H5N1 from different geographic areas isolated in a given year. Replikin analysis was performed separately for human HSN1 RPGs of each country. The results are shown for the Replikin Count for all data available on PubMed each year 2003-2006. Low levels of Replikin count, below 4, were observed in each host group until 2005-2006, when human H5N1 increased in Asian countries. Human RPG activity was upregulated in 2005-2006 most prominently in Indonesia. Using this data, Applicants predicted Indonesia would be the country most likely to first experience increased human mortality. The prediction was proven correct in 2007 when incidence of human morbidity and mortality in the Indonesian outbreak were exceptionally high and evidence of possible human to human transmission was observed. Changes in Replikin Count in the Replikin Peak Gene of the H5N1 isolates such as in FIG. 6 allows for identification of those geographic areas in which the influenza virus strain is more virulent than other geographic areas.

[0269] E. Replikin Peak Genes as Predictors of Outbreaks

[0270] Identification of the pB1 Replikin Peak Gene as a more significant gene area for changes in Replikin concentration effecting virulence reflects the same phenomenon in equine influenza as demonstrated in the pB1 gene area of H5N1. See FIG. 7 and compare to FIGS. 2 and 3. FIG. 7 additionally demonstrates the cyclical nature of changes in Replikin Count over a period of years. These cycles are like those observed previously for H1N1 since 1918. See FIGS. 2 and 3 and U.S. Pat. No. 7,189,800 (Tables 3-6). It is noteworthy that increases in Replikin Count in virulent influenza isolates have generally ranged between 2 and 5, that is 2- to 3-fold above other influenza isolates. Replikin Counts in the Replikin Peak Gene of virulent isolates, however, have been observed to range between 2 and 20, that is a 10-fold change in concentration. This magnification makes sense in terms of the concentration of the Replikins in the Replikin Peak Gene, rather than an even distribution throughout other parts of the virus genome.

[0271] F. Replikin Concentration in Replikin Peak Gene of pB1 Area Correlates with Equine Influenza Epidemics

[0272] As with other influenza strains, an increase in Replikin concentration in equine influenza virus (EIV) has likewise been shown to be predictive of an increase in virulence of the virus and allows for prediction of forthcoming outbreaks or increases in morbidity and, in extreme cases, mortality. A review of publicly available amino acid sequences of isolates of EIV that demonstrates an increase in Replikin Count in the genome or a genome segment, or in a protein or protein fragment of the virus over time or between isolates is used as a predictor of an increase in outbreaks and morbidity in horses, donkeys, mules and other effected animals. Publicly available sequences for isolates of EIV from PubMed or other public or private sources may be analyzed by hand or using the FluForecast® search tool. (REPLIKINS LLC, Boston, Mass.).

[0273] Applicants have established a correlation between Replikin Count in the pB1 gene area (RPG) in EIV and an increase in virulence of the virus resulting in epidemics. The Applicants have reviewed publicly available amino acid sequences of isolates of EIV having accession numbers at www.pubmed.com and have identified increases in Replikin concentration in the Replikin Peak Gene of the pB1 gene area of the genome of the virus that relate to and predict an increase in outbreaks.

[0274] Applicants' initial analysis determined the Replikin Peak Genes within publicly available sequences of the pB1, pB2 and pA proteins of the H3N8 strain of influenza virus by analyzing publicly available sequences for the gene areas of the pB1, pB2 and pA proteins and identifying the protein segment having the highest concentration of continuous Replikin sequences within each gene area.

[0275] Applicants then compared the mean Replikin concentration in the identified Replikin Peak Gene for each of the three gene areas for isolates in each year having publicly available sequence information between 1977 and 2007. Applicants further analyzed all publicly available whole genome sequences for H3N8 between 1977 and 2007.

[0276] FIG. 7 illustrates a relationship between Replikin Counts of Replikin Peak Genes identified within the pB1, pB2, and pA genomic areas of equine influenza virus 1977-2007 and epidemics of equine encephalitis caused by H3N8 equine influenza. Replikin Count increases in the pB1 gene area are observed to occur one to three years before epidemic outbreaks while no increase in Replikin Count is observed in the pB2 and pA gene areas. Standard deviation of the means is again shown separately (as a clear column) to draw attention to the increase of some individual viruses with higher Replikin counts prior to the maximal Replikin count elevation, followed by viral outbreak.

[0277] Replikin Counts of the RPGs of the pA and pB2 genomic areas, which are immediately adjacent to the pB1 area in the H3N8 genome, remain below 5 and do not increase to the extent of the Replikin Count of the RPG of the pB1 area. These observed increases in the pB1 area and absence of increases in the pB2 and pA areas are in direct agreement with the data on H5N1 influenza reflected in FIG. 1.

[0278] The range of Replikin Counts in the RPGs of H3N8 may be observed to be similar to the range of Replikin Counts in other Influenza A species. See, e.g., FIG. 2. Further, Replikin Counts in H3N8 during quiescent periods are comparable to Replikin Counts in Influenza B at all observed times and comparable to other influenza species during quiescent periods, that is between lethal outbreaks. Additionally, Replikin Counts in H3N8 during epidemics are comparable to outbreak levels reached prior to epidemics in Influenza A. See, e.g., FIG. 2.

[0279] The data for FIG. 7 is provide in Table 4A below, which provides the yearly mean Replikin concentrations (with Standard Deviation) of publicly available peptide sequences of the identified Replikin Peak Gene (RPG) of the pB1 gene area, the yearly mean Replikin concentrations of publicly available peptide sequences of the identified Replikin Peak Gene (RPG) of the pA gene area, and the yearly mean Replikin concentrations of publicly available peptide sequences of the identified Replikin Peak Gene (RPG) of the pB2 gene area.

TABLE 4A
Equine Influenza

| | Replikin | | Replikin | | Replikin | Replikin |
|---|---|---|---|---|---|---|
| | Concentration | | Concentration | | Concentration | Concentration |
| Year | of pB1 Gene | SD | of RPG in pB1 | SD | of RPG in pA | of RPG in pB2 |
| 1972 | 1.8 | 0 | | | | 2.4 |
| 1977 | 16.7 | 0 | 16.7 | 0 | | 2.4 |
| 1978 | 11 | 12.7 | 11 | 12.7 | | 2.4 |
| 1979 | 22.2 | 0 | 22.2 | 0 | | 2.4 |
| 1980 | 6.7 | 8.8 | 6.7 | 8.8 | | 2.3 |
| 1982 | 17.8 | 0 | 17.8 | 0 | | 2.4 |
| 1985 | 20.6 | 2.4 | 20.6 | 2.4 | | 2.4 |
| 1986 | 13.3 | 11.1 | 13.3 | 11.1 | 3.4 | 2.3 |
| 1987 | 19.1 | 2.7 | 19.1 | 2.7 | | 2.4 |
| 1991 | 9.3 | 10.4 | 9.3 | 10.4 | 4.6 | 2.4 |
| 1992 | 15.6 | 0 | 15.6 | 0.2 | | 2.4 |
| 1998 | 2.2 | 0 | 2.2 | 0 | | 3.8 |
| 1999 | 2 | 0 | 2 | 0 | | 0.2 |
| 2000 | | | | | | 0.6 |
| 2001 | 9.9 | 11.2 | 9.9 | 11.2 | 2.2 | 2.4 |
| 2002 | 4.6 | 6.1 | 4.6 | 6.1 | 2.2 | 2.4 |
| 2003 | 2 | 0 | 2 | 0.2 | 3.1 | 2.4 |
| 2004 | 2.2 | 0.2 | 2.2 | 0.2 | 2.2 | 2.4 |
| 2005 | 18.5 | 2.8 | 18.5 | 2.8 | | 2.3 |
| 2006 | | | | | 3.5 | |
| 2007 | | | | | 2.1 | |

[0280] In FIG. 7, Series 1 reflects the mean Replikin concentration identified in the Replikin Peak Gene in the pB1 area of the genome. Series 2 reflects the standard deviation from mean Replikin concentration in the pB1 gene area. The large standard deviations in the first column of every pair are noteworthy as the Standard Deviation then drops as the mean Replikin concentration increases. This increase in standard deviation in the Replikin Peak Gene pB1 area probably reflects heterogeneity in the virus population once a more virulent strain of virus having a higher Replikin concentration has become present. The higher standard deviation suggests a more diverse population of the virus in which some members are relatively dormant whereas an increasing number are rapidly replicating. As the “build up” increases prior to the outbreak, more members are increasingly, rapidly replicating, thus raising the mean Replikin concentration. In contrast, as seen in Table 4A above, the stability of the Replikin concentration in neighboring genomic areas such as pA and pB2 demonstrate both the reproducibility of the quantitative measurement of the Replikin concentration, the constancy over many years of the Replikin concentration in dormant areas, and the high degree of specificity of the increases in the pB1 area. The standard deviation then drops as the more virulent strain or strains enters an epidemic stage and less virulent strains (having lower Replikin concentrations) become less competitive and less present as a percentage of isolates in the host population. To the inventors' knowledge no such highly specific changes in virus structure have been observed to correlate with outcomes in the host.

[0281] Specifically, Series 3 in FIG. 7 reflects the Replikin concentration identified in the Replikin Peak Gene in the pA gene area of the genome, which neighbors the pB1 gene area. The Replikin concentration of the Replikin Peak Gene in the pA gene area is observed to be remarkably constant over the analyzed years, never going above 5. This constancy stands in marked contrast to the extensive changes in Replikin concentration noted in the pB1 gene area. These control data validate the location of the most significant Replikin Peak Gene for the present isolates of virus in the pB1 gene area. Because the pA gene is right next to the pB1 gene, the differences in magnitude of change in Replikin concentration between these neighboring areas is quite remarkable.

[0282] Specifically, Series 4 in FIG. 7 reflects the Replikin concentration identified in the Replikin Peak Gene in the pB2 gene area of the genome, which also neighbors the pB1 gene area. The Replikin concentration of the Replikin Peak Gene in the pB1 gene area is also observed to be remarkably constant over the analyzed years, not going above 4. This constancy again stands in marked contrast to the extensive changes in Replikin concentration noted in the pB1 gene area. Again, the control data validate the location of the most significant Replikin Peak Gene for the present isolates of virus in the pB1 gene area. Because the pB2 gene is right next to the pB1 gene, the differences in change in Replikin concentration between these neighboring areas is also remarkable.

[0283] VII. Methods of Predicting and Treating Outbreaks of Foot and Mouth Disease Virus (FMDV) Using RPGs and Related Replikin Sequences

[0284] An increase in Replikin concentration in the VP1 protein (containing an RPG of the virus genome) of foot and mouth disease virus (FMDV) is predictive of an increase in virulence and lethality of the virus and allows for prediction of forthcoming outbreaks or increases in virulence or lethality. Applicants have reviewed all publicly available amino acid sequences of isolates of FMDV having accession numbers at www.pubmed.com between 1969 and 2006 and have identified increases in Replikin concentration in the VP1 protein of FMDV (e.g., SEQ ID NO: 157) that relate to and predict certain known outbreaks of Foot and Mouth Disease. FIG. 11 illustrates the correlation of Replikin Count observed in the VP1 protein of isolates of foot and mouth disease virus on a year by year basis and observed outbreaks.

[0285] Applicants reviewed Accession No. ABM63320 (SEQ ID NO: 157), which provides the amino acid sequence of the entire serotype-O FMDV VP1 polyprotein, and identified two RPGs. The first RPG begins at amino acid residue 925 and continues through amino acid residue 1018 and was isolated in silico as SEQ ID NO: 124. Five Replikin sequences were isolated (SEQ ID NOS: 125-129) in the first RPG, which gave the first RPG a Replikin Count of 6.3. The first RPG represents the Replikin Peak Gene of a fragment of the VP1 polyprotein.

[0286] The second Replikin Peak Gene begins at amino acid residue 1300 and continues through amino acid residue 1481 and was isolated in silico as SEQ ID NO: 130. Twenty-six Replikin were isolated in the second RPG (SEQ ID NOS: 131-156). The second Replikin Peak Gene Area has a Replikin Count of 14.3 and represents the Replikin Peak Gene of the entire reported VP1 polyprotein. Conserved Replikins within the RPG at SEQ ID NO: 130 are also contained, for example, in sequence fragments reported at Accession Nos. ABA46641, AAG43385, AAP81678 and ABG77564. Likewise, parts of the RPG of SEQ ID NO: 124 are contained in these accession numbers.

[0287] In the amino-terminal of SEQ ID NO: 157 (Accession No. ABM63320) SEQ ID NOS: 158-160 were isolated as Replikins. In the mid-molecule, SEQ ID NOS: 161-194 were isolated as Replikins. In the carboxy-terminal, SEQ ID NOS: 195-213 were isolated as Replikins. Each of these Replikin sequences is a preferred sequence for immunogenic compositions and vaccines and for other diagnostic, therapeutic and predictive purposes as described herein.

[0288] FIG. 11 illustrates the concentration of Replikin sequence observed in the VP1 protein of isolates of the common serotype-O of foot and mouth disease virus having publicly available accession numbers on a year by year basis between 1969 and 2006. Observed European and UK outbreaks of Foot and Mouth Disease are noted and relate to observed increases in Replikin Count prior to disease outbreak.

[0289] Prediction of the listed epidemics as well as future outbreaks may be made, for example, by reviewing the Replikin Counts of isolates of FMDV and comparing the Replikin Counts of the VP1 protein or the RPG within the VP1 protein for a particular year with Replikin Counts from other years. A significant increase in Replikin Count from one year to the next and preferably over one, two or three years provides predictive value of an emerging strain of FMDV that may begin an outbreak of Foot and Mouth Disease. A Foot and Mouth Disease outbreak may be predicted within about six months to about one year or more from the observation of a significant increase in Replikin Count.

[0290] More preferably, an outbreak of Foot and Mouth Disease may be predicted within about six months to about one year from the observation of a significant increase in Replikin count over two or three years. An outbreak may likewise be predicted within about six months to about one year from the initial observation of a decrease in Replikin Count following a significant increase. Using this method, Applicants predicted the Aug. 3, 2007 outbreak of FMDV in the United Kingdom months prior to the outbreak.

[0291] The data for FIG. 11 is provided in Table 5 below. Note that data is available for 1958 and 1962, but was not included in FIG. 11. Note also that no data was available for 1959 through 1961, 1963 through 1968 and 2004.

TABLE 5
FMDV Serotype O Replikin Counts

| | Accession | | | | |
|---|---|---|---|---|---|
| | Records for | | | Significance | Significance |
| | Serotype-O | Replikin | Standard | (compared to lowest | (compared to previous |
| Year | FMDV VP1 | Count | Deviation | value) | year) |
| 1958 | 1 | 3.8 | 0.0 | | |
| 1962 | 172 | 0.8 | 0.2 | low p < 0.001 | |
| 1969 | 1 | 0.4 | 0.0 | | prev p < 0.001 |
| 1970 | 2 | 0.7 | 0.4 | low p < 0.05 | prev p < 0.40 |
| 1971 | 1 | 3.3 | 0.0 | | prev p < 0.05 |
| 1972 | 1 | 0.5 | 0.0 | | |
| 1973 | 1 | 0.5 | 0.0 | | |
| 1974 | 7 | 1.1 | 0.3 | low p < 0.001 | prev p < 0.001 |
| 1975 | 6 | 1.0 | 0.5 | low p < 0.001 | prev p > 0.50 |
| 1976 | 4 | 1.2 | 0.1 | low p < 0.001 | prev p < 0.40 |
| 1977 | 4 | 1.0 | 0.4 | low p < 0.001 | prev p < 0.20 |
| 1978 | 8 | 1.0 | 0.1 | low p < 0.001 | prev p > 0.50 |
| 1979 | 47 | 2.5 | 1.4 | low p < 0.001 | prev p < 0.001 |
| 1980 | 5 | 1.5 | 0.5 | low p < 0.001 | prev p < 0.001 |
| 1981 | 2 | 0.8 | 0.3 | low p < 0.04 | prev p < 0.10 |
| 1982 | 21 | 0.9 | 0.1 | low p < 0.001 | prev p > 0.50 |
| 1983 | 6 | 0.9 | 0.4 | low p < 0.001 | prev p > 0.50 |
| 1984 | 1 | 1.2 | 0.0 | | prev p < 0.10 |
| 1985 | 3 | 1.2 | 0.7 | low p < 0.02 | prev p > 0.50 |
| 1986 | 2 | 0.8 | 0.5 | low p < 0.05 | prev p > 0.50 |
| 1987 | 1 | 3.6 | 0.0 | | prev p < 0.05 |
| 1988 | 3 | 1.2 | 0.0 | | |
| 1989 | 6 | 1.3 | 0.8 | low p < 0.001 | prev p > 0.50 |
| 1990 | 5 | 2.0 | 1.3 | low p < 0.02 | prev p < 0.30 |
| 1991 | 7 | 3.5 | 2.4 | low p > 0.50 | prev p < 0.10 |
| 1992 | 9 | 2.1 | 1.0 | low p < 0.001 | prev p < 0.10 |
| 1993 | 16 | 2.2 | 1.4 | low p < 0.001 | prev p > 0.50 |
| 1994 | 18 | 2.2 | 1.1 | low p < 0.001 | prev p > 0.50 |
| 1995 | 12 | 2.0 | 0.8 | low p < 0.001 | prev p > 0.50 |
| 1996 | 12 | 1.6 | 1.1 | low p < 0.001 | prev p < 0.30 |
| 1997 | 48 | 2.6 | 1.1 | low p < 0.001 | prev p < 0.01 |
| 1998 | 72 | 1.2 | 1.1 | low p < 0.001 | prev p < 0.001 |
| 1999 | 49 | 2.3 | 1.3 | low p < 0.001 | prev p < 0.001 |
| 2000 | 61 | 1.3 | 0.8 | low p < 0.001 | prev p < 0.001 |
| 2001 | 8 | 1.8 | 0.9 | low p < 0.001 | prev p < 0.10 |
| 2002 | 2 | 1.1 | 0.2 | low p < 0.02 | prev p < 0.05 |
| 2003 | 8 | 1.3 | 0.5 | low p < 0.001 | prev p < 0.40 |
| 2005 | 8 | 1.3 | 1.0 | low p < 0.001 | prev p > 0.50 |
| 2006 | 3 | 3.8 | 3.1 | low p > 0.50 | prev p < 0.20 |

[0292] A. Prediction using VP1 Protein of All Serotypes

[0293] In addition to FMDV VP1 proteins of serotype-O, Applicants also analyzed publicly available sequences for isolates of all reported serotypes of FMDV VP1 protein from PubMed. The data is provided in Table 6 below. Note the increase in Replikin Count correlated with two epidemics in the United Kingdom (and other European countries) in 2001 and in the United Kingdom in 2007. Also note the low Replikin Counts during quiescence. Replikin Count increases from 1.6 in 1998, to 2.5 in 1999, to 2.7 in the year of the epidemic, 2001. Then post-epidemic, three lower Replikin Count years are noted, 1.5 in 2002, 1.5 in 2003, and 1.1 in 2005 (there were no publicly available sequences from 2004). The Replikin Count then rose to 2.8 in 2006 just prior to the outbreak in 2007. Note that the p values are less than 0.001 with respect to previous Replikin Counts.

TABLE 6
FMDV (all isolates)

| | Accession | | | | |
|---|---|---|---|---|---|
| | Records for | | | Significance | Significance |
| | FMDV VP1 | Replikin | Standard | (compared to lowest | (compared to previous |
| Year | protein | Count | Deviation | value) | year) |
| 1998 | 92 | 1.6 | ±1.2 | low p < 0.001 | prev p < 0.001 |
| 1999 | 60 | 2.5 | ±1.3 | low p < 0.001 | prev p < 0.001 |
| 2000 | 115 | 1.7 | ±1.4 | low p < 0.001 | prev p < 0.001 |
| 2001 | 32 | 2.7 | ±1.0 | low p < 0.001 | prev p < 0.001 |
| 2002 | 3 | 1.5 | ±0.8 | low p < 0.05 | prev p < 0.02 |
| 2003 | 10 | 1.5 | ±0.8 | low p < 0.001 | prev p > 0.50 |
| 2005 | 43 | 1.1 | ±0.6 | low p < 0.001 | prev p < 0.10 |
| 2006 | 36 | 2.8 | ±0.9 | low p < 0.002 | prev p < 0.001 |

[0294] B. Prediction Using VP1 Protein of Serotype C

[0295] Table 7 provides Replikin Count data for isolates of serotype-C FMDV for some years between 1955 and 2006. Note the significant increases over the low value in Replikin Count in 1998 and 1999 (prior to the 2001 epidemic in the UK) and the significant increase over the low value in 2006 (prior to the 2007 outbreak in the UK). Years having no available data are not reflected in the table.

TABLE 7
FMDV Serotype C

| | | | Stan- | | |
|---|---|---|---|---|---|
| | Accession | | dard | Significance | Significance |
| | Records for | Replikin | Devi- | (compared to | (compared to |
| Year | Serotype C | Count | ation | lowest value) | previous year) |
| 1955 | 1 | 2.7 | 0.0 | | |
| 1957 | 1 | 2.8 | 0.0 | | |
| 1979 | 12 | 1.4 | 0.5 | low p < 0.001 | prev p < 0.001 |
| 1982 | 2 | 2.1 | 1.6 | low p > 0.50 | prev p > 0.50 |
| 1988 | 1 | 1.1 | 0.0 | | prev p > 0.50 |
| 1989 | 1 | 1.1 | 0.0 | | |
| 1991 | 3 | 0.5 | 0.0 | low p < 0.001 | prev p < 0.001 |
| 1992 | 2 | 0.5 | 0.0 | low p < 0.001 | prev p > 0.50 |
| 1993 | 5 | 0.5 | 0.0 | low p < 0.001 | prev p < 0.40 |
| 1997 | 2 | 1.4 | 1.3 | low p < 0.30 | prev p < 0.30 |
| 1998 | 2 | 2.9 | 0.0 | | prev p < 0.20 |
| 1999 | 4 | 3.1 | 0.4 | low p < 0.10 | prev p < 0.40 |
| 2006 | 10 | 3.0 | 0.2 | low p < 0.001 | prev p > 0.50 |

[0296] The correlation between Replikin concentration and viral outbreaks noted above and illustrated in FIG. 11 provide a method of predicting outbreaks of Foot and Mouth Disease by monitoring increases in Replikin concentration in the VP1 protein of all available FMDV isolates. The method may also employ all available serotype-O isolates or serotype-C isolates of the virus.

[0297] The epidemiology and virology FMDV is different from the epidemiology and virology of some other viruses discussed herein such as Influenza virus. Nevertheless, a correlation between increases in Replikin Count in the FMDV VP1 protein and outbreaks of the virus provides compounding data establishing a shared phenomenon of rapid replication and virulence with an overwhelming number of other tested viruses and organisms.

[0298] C. Replikins Conserved in Serotype O FMDV RPGs

[0299] In serotype-O of FMDV, two conserved Replikin sequences contained within the Replikin Peak Gene are hkqkivapvk (SEQ ID NO: 91) and hpsearhkqkivapvk (SEQ ID NO: 92). A point mutant of the hpsearhkqkivapvk sequence to hptearhkqkivapvk (SEQ ID NO: 93) (mutation underlined) reportedly occurred in isolates from 1967 and 2007. The Replikin sequence hkqkivapvk (SEQ ID NO: 91) has been conserved from 1962 to 2006. The Replikin sequence hpsearhkqkivapvk (SEQ ID NO: 92) has been conserved from 1962 to 2006 except for the point mutation hptearhkqkivapvk (SEQ ID NO: 93), which is present in isolates reportedly having caused the 1967 outbreak (isolate O₁BFS) and now the 2007 outbreak in the United Kingdom. These isolated conserved Replikin sequence are embodiments of the invention of particular preference for predictive, diagnostic and therapeutic capacity.

[0300] Table 8 provides the accession numbers of isolates between 1962 and 2006 containing the conserved sequence hkqkivapvk (SEQ ID NO: 91) and the amino acid position within the VP1 protein sequence where the conserved Replikin sequence begins.

TABLE 8
FMDV Conserved SEQ ID NO: 91

| | |
|---|---|
| 1962 | CAC22210 position 202, AAP81678 position 153, AAP81677 position 153, AAP81676 position 153, |
| | AAP81675 position 153, AAP81674 position 153, ABA46701 position 201, ABA46700 position |
| | 201, ABA46699 position 201, ABA46698 position 201, ABA46697 position 201, ABA46696 |
| | position 201, ABA46695 position 201, ABA46693 position 201, ABA46692 position 201, |
| | ABA46691 position 201, ABA46690 position 201, ABA46689 position 201, ABA46688 position |
| | 201, ABA46687 position 201, ABA46686 position 201, ABA46685 position 201, ABA46684 |
| | position 201, ABA46683 position 201, ABA46682 position 201, ABA46681 position 201, |
| | ABA46679 position 201, ABA46678 position 201, ABA46677 position 201, ABA46675 position |
| | 201, ABA46674 position 201, ABA46673 position 201, ABA46672 position 201, ABA46671 |
| | position 201, ABA46670 position 201, ABA46669 position 201, ABA46668 position 201, |
| | ABA46666 position 201, ABA46665 position 201, ABA46664 position 201, ABA46663 position |
| | 201, ABA46662 position 201, ABA46661 position 201, ABA46660 position 201, ABA46659 |
| | position 201, ABA46658 position 201, ABA46657 position 201, ABA46655 position 201, |
| | ABA46654 position 201, ABA46653 position 201, ABA46652 position 201, ABA46651 position |
| | 201, ABA46650 position 201, ABA46649 position 201, ABA46648 position 201, ABA46647 |
| | position 201, ABA46644 position 201, ABA46643 position 201, ABA46642 position 201, |
| | ABA46641 position 201, ABA46640 position 201, ABA46639 position 201, ABA46638 position |
| | 201, ABA46637 position 201, ABA46614 position 201, ABA46613 position 201, ABA46612 |
| | position 201, ABA46611 position 201, ABA46610 position 201, ABA46609 position 201, |
| | ABA46606 position 201, ABA46605 position 201, ABA46604 position 201, ABA46603 position |
| | 201, ABA46602 position 201, ABA46601 position 201, ABA46600 position 201, ABA46597 |
| | position 201, ABA46596 position 201, ABA46594 position 201, ABA46591 position 201, |
| | ABA46590 position 201, ABA46589 position 201, ABA46588 position 201, ABA46586 position |
| | 201, ABA46585 position 201, ABA46583 position 201, ABA46582 position 201, ABA46581 |
| | position 201, ABA46580 position 201, ABA46579 position 201, ABA46578 position 201, |
| | ABA46576 position 201, ABA46574 position 201, ABA46573 position 201, ABA46571 position |
| | 201, ABA46570 position 201, ABA46569 position 201, ABA46568 position 201, ABA46566 |
| | position 201, ABA46565 position 201, ABA46563 position 201, ABA46561 position 201, |
| | ABA46560 position 201, ABA46542 position 201, ABA46541 position 201, ABA46539 position |
| | 201, ABA46538 position 201, ABA46537 position 201, ABA46536 position 201, ABA46535 |
| | position 201, ABA46534 position 201, ABA46533 position 201, ABA46532 position 201, |
| | ABA46531 position 201, ABA46559 position 201, ABA46540 position 201, |
| 1969 | CAB62584 position 724 |
| 1972 | CAC22304 position 202. |
| 1974 | CAC22211 position 202, AAK69575 position 153, AAR85362 position 153, AAR85361 position |
| | 153, AAR22955 position 153, AAR22953 position 153. |
| 1975 | AAK69576 position 153, CAC20174 position 201, AAR85363 position 153, AAG35653 position 724. |
| 1976 | AAR22952 position 153, AAR22933 position 153, AAR22932 position 153. |
| 1977 | AAR22963 position 153, AAR22950 position 153, CAC48179 position 201. |
| 1978 | ABA46745 position 201, ABA46744 position 201, ABA46743 position 201, ABA46742 position |
| | 201, ABA46740 position 201, AAR22930 position 153. |
| 1979 | CAC22173 position 43, AAQ88330 position 153, AAQ88328 position 153, AAQ88327 position 153, |
| | AAQ88325 position 153, AAQ88324 position 153, AAQ88323 position 153, AAQ88322 position |
| | 153, AAQ88321 position 153, AAQ88320 position 153, AAQ88319 position 153, AAQ88318 |
| | position 153, AAQ88317 position 153, AAQ88316 position 153, AAQ88315 position 153, |
| | AAQ88314 position 153, AAQ88313 position 153, AAQ88312 position 153, AAG28368 position |
| | 43, AAG28367 position 43, AAG28366 position 43, AAG28362 position 43, AAG28357 position |
| | 43, AAG28356 position 43, AAG28355 position 43, AAG28354 position 43, AAG28353 position |
| | 43, AAG28352 position 43, AAG28348 position 43. |
| 1980 | AAR22962 position 153, AAR22959 position 153, AAR22941 position 153. |
| 1981 | AAR22951 position 153 |
| 1982 | CAC20178 position 201, AAZ31360 position 201, AAZ31359 position 201, AAZ31358 position |
| | 201, AAZ31357 position 201, AAZ31356 position 201, AAZ31355 position 201, AAZ31354 |
| | position 201, AAZ31353 position 201, AAZ31352 position 201, AAZ31351 position 201, |
| | AAZ31350 position 201, AAZ31349 position 201, AAZ31348 position 201, AAZ31347 position |
| | 201, AAZ31346 position 201, AAZ31345 position 201, AAZ31344 position 201, AAZ31343 |
| | position 201, AAZ31342 position 201. |
| 1983 | AAR22960 position 153, AAR22938 position 153, AAR22937 position 153. |
| 1985 | CAC22326 position 90. |
| 1986 | AAR22954 position 153. |
| 1987 | AAK62003 position 43. |
| 1988 | AAK69568 position 153, AAK69567 position 153. |
| 1989 | CAC22174 position 90, AAR22961 position 153, AAK62024 position 69. |
| 1990 | CAC22178 position 43, CAC22327 position 58. |
| 1991 | CAC22175 position 43, CAC22328 position 62. |
| 1992 | CAC22176 position 43, CAC22240 position 85, CAC48182 position 201. |
| 1993 | CAC22179 position 43, CAC40792 position 201, CAC40789 position 201, CAC40796 position 102. |
| 1994 | CAC22180 position 76, CAC22233 position 62, CAC22227 position 60, CAC22215 position 47, |
| | CAC22208 position 82, CAC22201 position 43, CAC22167 position 43, AAK62012 position 43, |
| | CAC40794 position 102, CAC40790 position 201, CAC40795 position 102, CAC40797 position |
| | 201. |
| 1995 | CAC22231 position 152, CAC22216 position 44, CAC22171 position 103, AAK62022 position 69. |
| 1996 | CAC22194 position 127, CAC51235 position 201, AAR22945 position 153, AAR22942 position |
| | 153, AAK62005 position 69. |
| 1997 | CAC51273 position 201, CAC51268 position 201, CAC51249 position 201, CAC51236 position |
| | 201, AAL05257 position 43, AAL05249 position 43, AAL05248 position 85, AAL05247 position |
| | 62, AAL05246 position 76, AAL05245 position 43, AAL05243 position 56, AAL05242 position 43, |
| | AAL05236 position 43, AAL05235 position 65, AAL05234 position 43, AAL05233 position 43, |
| | AAL05232 position 43, AAL05231 position 43, AAL05230 position 43, AAL05229 position 43, |
| | AAL05228 position 43, AAL05227 position 85, AAL05226 position 43, AAL05225 position 76, |
| | AAL05223 position 43, AAL05222 position 43, AAL05221 position 43, AAL05220 position 122, |
| | AAL05219 position 43, AAL05218 position 52, AAL05217 position 43, AAL05216 position 66, |
| | AAL05214 position 43, AAL05213 position 93, AAL05211 position 58, AAL05207 position 43, |
| | AAL05206 position 62, AAL05205 position 67, AAL05196 position 64. |
| 1998 | CAC22229 position 201, ABI16250 position 201, ABI16249 position 201, ABI16248 position 201, |
| | ABI16247 position 201, ABI16246 position 201, ABI16245 position 201, ABI16244 position 201, |
| | ABI16242 position 201, ABI16241 position 201, ABI16240 position 201, ABI16239 position 201, |
| | ABI16238 position 201, ABI16237 position 201, ABI16236 position 201, ABI16235 position 201, |
| | ABI16234 position 201, ABI16233 position 201, ABI16232 position 201, ABI16231 position 201, |
| | ABI16230 position 201, ABI16229 position 201, ABI16228 position 201, ABI16227 position 201, |
| | CAC51269 position 201, CAC51239 position 201, CAC51238 position 201, AAR85364 position |
| | 153, AAR22957 position 153, AAL05256 position 43, AAL05255 position 43, AAL05254 position |
| | 43, AAL05253 position 43, AAL05250 position 43, AAL05244 position 43, AAL05241 position 43, |
| | AAL05240 position 43, AAL05238 position 43, AAL05237 position 45, AAL05212 position 43. |
| 1999 | CAC22228 position 100, CAC22200 position 100, AAG43385 position 43, CAC51332 position 143, |
| | CAC51270 position 175, CAC51255 position 201, CAC51318 position 201, CAC51247 position |
| | 201, CAC51246 position 201, CAC51245 position 201, CAD62370 position 925, CAD62369 |
| | position 925, CAD62208 position 925, CAC20187 position 201, AAR22956 position 153, |
| | AAR22940 position 153, AAF06146 position 43, AAD41912 position 81, AAD41131 position 81, |
| | AAL05251 position 43, AAL05215 position 43, AAL05210 position 43, AAL05209 position 43, |
| | AAL05208 position 43, AAL05204 position 43, AAL05203 position 45, AAL05202 position 43, |
| | AAL05201 position 43, AAL05200 position 43, AAL05199 position 43, AAL05198 position 43, |
| | AAL05197 position 70, AAL05195 position 59, AAL05194 position 58, AAL05193 position 43, |
| | AAL05192 position 43, AAL05191 position 43. |
| 2000 | CAC22209 position 201, AAL09392 position 153, AAL09391 position 153, AAK69397 position |
| | 153, ABF18551 position 43, ABF18550 position 43, ABF18549 position 43, ABF18548 position 43, |
| | CAC51275 position 201, CAC51271 position 201, CAC51267 position 201, CAC51264 position |
| | 201, CAC51263 position 201, CAC51261 position 201, CAC51258 position 201, CAC51257 |
| | position 201, BAC06475 position 925, CAD62372 position 925, CAD62371 position 925, |
| | AAG27038 position 153, AAG27037 position 153 |
| 2001 | CAD62373 position 925, AAK92375 position 925, CAC35464 position 201, CAC35463 position |
| | 201, CAC35462 position 201, CAC35461 position 201, CAC23917 position 925, CAC86575 |
| | position 925. |
| 2002 | AAR07959 position 153, AAM62134 position 201. |
| 2003 | AAQ93493 position 925, AAR07963 position 153, AAR07962 position 153, AAR07961 position |
| | 153, AAR07960 position 153, AAR07965 position 153, AAR07964 position 153. |
| 2005 | ABD14417 position 201, ABC55721 position 43, CAJ51080 position 201, CAJ51079 position 201, |
| | CAJ51078 position 201, CAJ51077 position 201, CAJ51076 position 201, CAJ51075 position 201. |
| 2006 | ABG77563 position 197, ABG77564 position 30 |

[0301] Table 9 provides the accession numbers of FMDV isolates between 1962 and 2006 containing the conserved sequence hpsearhkqkivapvk (SEQ ID NO: 92) or the point mutation hptearhkqkivapvk (SEQ ID NO: 93) and the amino acid position within the VP1 protein sequence where the conserved Replikin sequence begins.

TABLE 9
FMDV SEQ ID NO: 92 OR SEQ ID NO: 93

| | |
|---|---|
| 1962 | AAP81678 position 147, AAP81677 position 147, ABA46700 position 195, ABA46699 position |
| | 195, ABA46698 position 195, ABA46697 Position 195, ABA46696 position 195, ABA46695 |
| | position 195, ABA46693 position 195, ABA46692 position 195, ABA46691 position 195, |
| | ABA46690 position 195, ABA46689 position 195, ABA46688 position 195, ABA46687 position |
| | 195, ABA46686 position 195, ABA46685 position 195, ABA46684 position 195, ABA46683 |
| | position 195, ABA46682 position 195, ABA46681 position 195, ABA46679 position 195, |
| | ABA46678 position 195, ABA46677 position 195, ABA46675 position 195, ABA46673 position |
| | 195, ABA46672 position 195, ABA46671 position 195, ABA46670 position 195, ABA46666 |
| | position 195, ABA46665 position 195, ABA46664 position 195, ABA46663 position 195, |
| | ABA46662 position 195, ABA46661 position 195, ABA46659 position 195, ABA46658 position |
| | 195, ABA46657 position 195, ABA46655 position 195, ABA46654 position 195, ABA46649 |
| | position 195, ABA46648 position 195, ABA46647 position 195, ABA46644 position 195, |
| | ABA46643 position 195, ABA46642 position 195, ABA46640 position 195, ABA46639 position |
| | 195, ABA46638 position 195, ABA46637 position 195, ABA46614 position 195, ABA46613 |
| | position 195, ABA46612 position 195, ABA46611 position 195, ABA46609 position 195, |
| | ABA46606 position 195, ABA46605 position 195, ABA46604 position 195, ABA46603 position |
| | 195, ABA46602 position 195, ABA46601 position 195, ABA46600 position 195, ABA46588 |
| | position 195, ABA46581 position 195, ABA46574 position 195, ABA46573 position 195, |
| | ABA46571 position 195, ABA46570 position 195, ABA46569 position 195, ABA46568 position |
| | 195, ABA46566 position 195, ABA46565 position 195, ABA46563 position 195, ABA46561 |
| | position 195, ABA46539 position 195, ABA46538 position 195, ABA46537 position 195, |
| | ABA46536 position 195, ABA46535 position 195, ABA46531 position 195, ABA46559 position |
| | 195. |
| 1974 | AAR85362 position 147, AAR85361 position 147. |
| 1975 | CAC20174 position 195. |
| 1977 | AAR22963 position 147, AAR22950 position 147. |
| 1978 | ABA46743 position 195, ABA46742 position 195, ABA46740 position 195. |
| 1979 | AAQ88330 position 147, AAQ88328 position 147, AAQ88325 position 147, AAQ88324 position |
| | 147, AAQ88323 position 147, AAQ88321 position 147, AAQ88319 position 147, AAQ88317 |
| | position 147, AAQ88316 position 147, AAQ88315 position 147, AAQ88314 position 147, |
| | AAQ88313 position 147, AAQ88312 position 147, AAG28362 position 37, AAG28355 position 37. |
| 1985 | CAC22326 position 84. |
| 1987 | AAK62003 position 37. |
| 1989 | CAC22174 position 84, AAK62024 position 63. |
| 1990 | CAC22178 position 37. |
| 1991 | CAC22175 position 37, CAC22328 position 56. |
| 1992 | CAC22240 position 79. |
| 1994 | CAC22233 position 56. |
| 1995 | CAC22216 position 38, CAC22171 position 97. |
| 1996 | CAC22194 position 121, CAC51235 position 195, AAR22945 position 147, AAR22942 position 147, |
| | AAK62005 position 63. |
| 1997 | CAC51273 position 195, CAC51268 position 195, CAC51249 position 195, CAC51236 position |
| | 195, AAL05249 position 37, AAL05248 position 79, AAL05247 position 56, AAL05246 position |
| | 70, AAL05245 position 37, AAL05243 position 50, AAL05242 position 37, AAL05236 position 37, |
| | AAL05235 position 59, AAL05234 position 37, AAL05233 position 37, AAL05229 position 37, |
| | AAL05228 position 37, AAL05221 position 37, AAL05207 position 37, AAL05196 position 58. |
| 1998 | ABI16250 position 195, ABI16249 position 195, ABI16248 position 195, ABI16247 position 195, |
| | ABI16246 position 195, ABI16245 position 195, ABI16244 position 195, ABI16242 position 195, |
| | ABI16241 position 195, ABI16240 position 195, ABI16239 position 195, ABI16238 position 195, |
| | ABI16237 position 195, ABI16236 position 195, ABI16235 position 195, ABI16234 position 195, |
| | ABI16232 position 195, ABI16231 position 195, ABI16229 position 195, ABI16227 position 195, |
| | CAC51239 position 195, CAC51238 position 195, AAR22957 position 147, AAL05256 position 37, |
| | AAL05255 position 37, AAL05254 position 37, AAL05253 position 37, AAL05250 position 37, |
| | AAL05244 position 37, AAL05241 position 37, AAL05240 position 37, AAL05238 position 37, |
| | AAL05237 position 39 |
| 1999 | CAC22228 position 94, AAG43385 position 37, CAC51332 position 137, CAC51255 position 195, |
| | CAC51318 position 195, CAC51247 position 195, CAC51246 position 195, CAC51245 position |
| | 195, CAD62370 position 919, CAD62208 position 919, CAC20187 position 195, AAR22956 |
| | position 147, AAF06146 position 37, AAL05251 position 37, AAL05210 position 37, AAL05209 |
| | position 37, AAL05208 position 37, AAL05204 position 37, AAL05203 position 39, AAL05202 |
| | position 37, AAL05201 position 37, AAL05200 position 37, AAL05198 position 37, AAL05195 |
| | position 53, AAL05194 position 52, AAL05193 position 37. |
| 2000 | CAC22209 position 195, AAL09392 position 147, AAL09391 position 147, AAK69397 position |
| | 147, ABF18551 position 37, ABF18550 position 37, ABF18549 position 37, ABF18548 position 37, |
| | CAC51275 position 195, CAC51271 position 195, CAC51267 position 195, CAC51264 position |
| | 195, CAC51263 position 195, CAC51261 position 195, CAC51258 position 195, CAC51257 |
| | position 195, BAC06475 position 919, CAD62372 position 919, CAD62371 position 919, |
| | AAG27038 position 147, AAG27037 position 147, ABA46733 position 195, ABA46732 position |
| | 195, ABA46731 position 195, ABA46730 position 195, ABA46729 position 195, ABA46728 |
| | position 195, ABA46727 position 195, ABA46726 position 195, ABA46725 position 195, |
| | ABA46724 position 195, ABA46722 position 195, ABA46721 position 195, ABA46720 position |
| | 195, ABA46719 position 195, ABA46717 position 194, ABA46716 position 195, ABA46715 |
| | position 195, ABA46714 position 195, ABA46713 position 195, ABA46712 position 195, |
| | ABA46711 position 195, ABA46709 position 195, ABA46708 position 195, ABA46706 position |
| | 195, ABA46705 position 195, ABA46704 position 195, BAB18050 position 195. |
| 2001 | CAD62373 position 919, AAK92375 position 919, CAC35464 position 195, CAC35463 position 195, |
| | CAC35462 position 195, CAC35461 position 195, CAG23917 position 919. |
| 2002 | AAM62134 position 195. |
| 2003 | AAQ93493 position 919. |
| 2005 | ABD14417 position 195, ABC55721 position 37. |
| 2006 | ABG77563 position 191. |

[0302] Accession No. AAG43385 (SEQ ID NO: 107) reports an FMDV serotype O isolate from 1999 that partly contains the RPG of SEQ ID NO: 124 and contains the conserved sequence SEQ ID NO: 91. In SEQ ID NO: 107, no Replikin sequences were identified in the amino-terminal. Replikin sequence SEQ ID NO: 108 was identified in the mid-molecule. Replikin sequence SEQ ID NO: 91 was identified in the carboxy-terminus.

[0303] Accession No. AAP81678 (SEQ ID NO: 111), reports an FMDV serotype 0 isolate from 1962 that partly contains the RPG of SEQ ID NO: 124 and contains the conserved sequence SEQ ID NO: 91. Accession No. ABA46641 (SEQ ID NO: 114) likewise reports an FMDV serotype O isolate from 1962 that partly contains the RPG of SEQ ID NO: 124 and contains the conserved sequence of SEQ ID NO: 91 and the conserved sequence of SEQ ID NO: 92 but for a single unknown residue at position 199 (SEQ ID NO: 115). In SEQ ID NO: 114, no Replikin sequences were identified in the amino-terminus or mid-molecule portion of the sequence. SEQ ID NOS: 115 and 116 were isolated in the carboxy-terminus.

[0304] Accession No. ABG77564 (SEQ ID NO: 118) reports an FMDV serotype O isolated from 2006 that partly contains the RPG of SEQ ID NO: 124 and contains the conserved sequence SEQ ID NO: 91. In SEQ ID NO: 118, no Replikins were identified in the amino terminus of the sequence. SEQ ID NOS: 119-121 and 91 were identified as Replikins in the mid-molecule. And no Replikins were identified in the carboxy terminus.

[0305] In addition to the diagnostic power of Replikin technology shown in these examples, it is clear that recognition for the first time of this class of virus peptides, and the discovery that they are related to rapid replication, virus outbreaks and high morbidity and mortality, makes the Replikins, and particularly the Replikin Peak Gene structures illustrated here, new conserved prime targets for treatment and vaccines in FMDV and other viruses. For example, the Replikin sequences (SEQ ID NOS: 91-93) provide invariant targets for such a vaccine. Likewise, the RPGs of SEQ ID NOS: 124 and 130 and the Replikin sequence identified in the accession number sequences (SEQ ID NOS: 108, 115-116 and 119-121) are preferred sequences for immunogenic compositions and vaccines. An embodiment of the invention, therefore, is a vaccine comprising at least one of the sequences SEQ ID NOS: 91-93 or SEQ ID NOS: 108, 115-116 and 119-121 or any combination thereof.

[0306] VIII. Methods of Predicting and Treating Outbreaks of West Nile Virus Using RPGs and Related Replikin Sequences

[0307] Applicants have now demonstrated a correlation between an increase in Replikin Count in a Replikin Peak Gene of the west nile virus (WNV) (e.g., SEQ ID NO: 245) and outbreaks, morbidity and mortality in the viral disease. See FIG. 12. Applicants have also demonstrated a correlation between Replikin Count in the whole virus genome and morbidity and mortality. See U.S. Prov. Appln. Ser. No. 60/853,744, filed Aug. 16, 2007.

[0308] Review of publicly available sequences of isolates of WNV from 1982-2007 revealed a Replikin Peak Gene in the envelope protein of west nile virus that has now been associated with virulence and lethality. In comparison with morbidity and mortality data in the United States between 1999 and 2006, an association between Replikin Count in the envelope protein of west nile virus and morbidity and mortality data is clear. See FIG. 12. Applicants' analysis of a Replikin Peak Gene in an envelope protein sequence of Accession No. ABA54585 (e.g., SEQ ID NO: 245) is provided in Example 7 below.

[0309] FIG. 12 illustrates the Replikin Count of Replikins observed in the envelope protein in PubMed accession numbers on a year by year basis between 1982 and 2006. Increases in Replikin Count on a year by year basis are correlatable with both reported morbidity of the virus in the United States and reported mortality from viral infections in the United States.

[0310] The data for FIG. 12 is provided in Table 10 below. Years in which no data were available are not included in the table. It may be observed that Replikin Count correlates with changes in both morbidity and mortality in the U.S. population between 1999 and 2006. The data further make clear a relative decrease in Replikin Count in 2004 followed by a time of relative quiescence of the west nile virus in the United States in 2004 and 2005. Additionally, beginning in 2000, morbidity and mortality increases in relation to the increasing Replikin Count.

TABLE 10
WNV Envelope Protein

| | | | Mean | | | Mor- | Mor- |
|---|---|---|---|---|---|---|---|
| Year | PubMed Accession Number-Replikin Count | Isolates | RC | S.D. | Significance | bidity | tality |
| 1982 | 84028435 111 | 1 | 3.2 | 0.0 | | | |
| 1985 | P06935 109 NP_776014 109 NP_041724 109 NP_776013 109 | 6 | 3.2 | 0.0 | low p < | | |
| | NP_776012 109 AAA48498 109 | | | | .001 | | |
| 1988 | P14335 95 BAA00176 95 | 2 | 2.8 | 0.0 | prev | | |
| | | | | | p < .001 | | |
| 1995 | AAW80621 9 | 1 | 4.7 | 0.0 | | | |
| 1996 | P51681 8 | 1 | 2.3 | 0.0 | | | |
| 1998 | AAW81711 107 AAD28624 41 | 2 | 4.2 | 1.5 | low p < | | |
| | | | | | .50, | | |
| | | | | | prev | | |
| | | | | | p < .30 | | |
| 1999 | AAL10755 6 AAL10754 6 AAL10752 6 AAL10751 6 AAL10750 7 | 53 | 3.6 | 0.9 | low p < | 62 | 7 |
| | AAL10749 6 AAG49029 3 AAG49028 3 AAG49027 2 AAD31720 | | | | .005, | | |
| | 32 AAL10753 9 AAF26360 40 AAL10748 6 AAL10747 6 | | | | prev | | |
| | AAL10746 6 AAL10745 6 AAL10744 6 AAL10743 6 AAL10742 6 | | | | p > .50 | | |
| | AAL10741 4 AAL10740 6 AAL10738 6 AAL10737 6 AAL10736 6 | | | | | | |
| | AAL10735 6 AAL10734 6 AAL10733 6 AAL10732 6 AAL10731 6 | | | | | | |
| | AAL10730 6 AAL10729 6 AAL10728 6 AAL10727 6 AAL10725 10 | | | | | | |
| | AAL10724 6 AAL10723 6 id = 15919195 6 id = 12246899 6 | | | | | | |
| | id = 12246897 6 id = 12246895 6 id = 12246893 6 AAG49629 6 | | | | | | |
| | AAG49628 6 AAL10739 6 AAL10726 6 AAD28623 40 AAF20092 | | | | | | |
| | 97 AAG02040 97 AAF18443 97 AAF20205 97 AAF20207 7 | | | | | | |
| | AAF20206 7 AAF20204 7 | | | | | | |
| 2000 | AAK06624 97 AAG02039 98 AAG02038 97 | 3 | 2.8 | 0.0 | low p < | 21 | 2 |
| | | | | | .001, | | |
| | | | | | prev | | |
| | | | | | p < .001 | | |
| 2001 | AAM70028 28 AAL14222 30 AAL14221 30 AAL14220 30 | 129 | 3.6 | 2.0 | low p < | 66 | 9 |
| | AAL14219 30 AAL14218 30 AAL14217 30 AAL14216 30 | | | | .02, | | |
| | AAL14215 30 AAK58104 30 AAK58103 31 AAK58102 30 | | | | prev | | |
| | AAK58101 30 AAK58100 30 AAK58099 31 AAK58098 30 | | | | p < .001 | | |
| | AAK58097 30 AAK58096 30 AAK52303 30 AAK52302 30 | | | | | | |
| | AAK52301 30 AAK52300 30 AAK62766 32 AAK62765 32 | | | | | | |
| | AAK62764 32 AAK62763 32 AAK62762 32 AAK62761 32 | | | | | | |
| | AAK62760 32 AAK62759 32 AAK62758 32 AAK62757 32 | | | | | | |
| | AAK62756 32 AAL07765 6 AAL07764 6 AAL07763 6 AAL07762 6 | | | | | | |
| | AAL07761 6 AAK91592 20 AAM81753 97 AAM81752 97 | | | | | | |
| | AAM81751 97 AAM81750 97 AAM81749 97 AAM21941 32 | | | | | | |
| | AAK67141 7 AAK67140 7 AAK67139 7 AAK67138 7 AAK67137 7 | | | | | | |
| | AAK67136 7 AAK67135 7 id = 14550088 7 id = 14550086 7 | | | | | | |
| | id = 14550084 7 id = 14550082 7 id = 14550080 7 id = 14550078 7 | | | | | | |
| | id = 14550076 7 id = 14550074 7 id = 14550072 7 id = 14550070 7 | | | | | | |
| | AAK67124 3 AAK67123 7 AAK67122 7 AAK67121 7 AAK67120 7 | | | | | | |
| | AAK67119 7 AAK67118 7 AAK67117 7 AAK67116 7 AAK67115 7 | | | | | | |
| | AAK67114 7 AAK67113 7 AAK67112 7 AAK67111 7 AAK67110 7 | | | | | | |
| | AAK67109 7 AAK67108 7 AAK67107 7 AAK67106 7 AAK67105 7 | | | | | | |
| | AAK67104 7 AAK67103 7 AAK67102 7 AAK67101 7 AAK67100 7 | | | | | | |
| | AAK67099 7 AAK67098 7 AAK67097 7 AAK67096 7 AAK67095 7 | | | | | | |
| | AAK67094 7 AAK67093 7 AAK67092 7 AAK67091 7 AAK67090 7 | | | | | | |
| | AAK67089 7 AAK67088 7 AAK67087 7 AAK67086 7 AAK67085 7 | | | | | | |
| | AAK67084 7 AAK67083 7 AAK67082 7 AAK67081 7 AAK67080 7 | | | | | | |
| | AAK67079 7 AAK67078 7 AAK67077 7 AAK67076 7 AAK67075 7 | | | | | | |
| | AAK67074 7 AAK67073 7 AAK67072 7 AAK67071 7 AAK67070 5 | | | | | | |
| | AAK67069 7 AAK67068 7 AAK67067 7 AAK67066 7 AAK67065 7 | | | | | | |
| | AAK67064 7 AAL87748 19 AAL87747 18 AAL87746 19 | | | | | | |
| | AAL87745 18 AAL37596 18 AAM21944 24 | | | | | | |
| 2002 | AAO26579 30 AAO26578 30 AAN77484 3 AAM09856 6 | 17 | 4.8 | 1.4 | low p < | 4,156 | 284 |
| | AAM09855 6 AAM09854 6 AAN85090 97 AAO73303 36 | | | | .001, | | |
| | AAO73302 36 AAO73301 36 AAO73300 36 AAO73299 36 | | | | prev | | |
| | AAO73298 36 AAO73297 36 AAO73296 36 AAO73295 36 | | | | p < .002 | | |
| | AAL87234 96 | | | | | | |
| 2003 | AAP20887 96 AAR17575 32 AAR17574 32 AAR17573 32 | 107 | 5.2 | 1.5 | low p < | 9,862 | 264 |
| | AAR17572 32 AAR17571 32 AAR17570 32 AAR17569 32 | | | | .001, | | |
| | AAR17568 32 AAR17567 32 AAR17566 32 AAR17565 32 | | | | prev | | |
| | AAR17564 32 AAR17563 32 AAR17562 32 AAR17561 32 | | | | p < .30 | | |
| | AAR17560 32 AAR17559 32 AAR17558 32 AAR17557 32 | | | | | | |
| | AAR17556 32 AAR17555 32 AAR17554 32 AAR17553 32 | | | | | | |
| | AAR17552 32 AAR17551 32 AAR17550 32 AAR17549 32 | | | | | | |
| | AAR17548 32 AAR17547 32 AAR17546 32 AAR17545 32 | | | | | | |
| | AAR17544 32 AAR17543 32 AAR17542 32 AAQ87608 16 | | | | | | |
| | AAQ87607 16 AAQ87606 14 AAR10804 6 AAR10803 6 AAR10802 | | | | | | |
| | 6 AAR10801 6 AAR10800 6 AAR10799 6 AAR10798 6 AAR10797 | | | | | | |
| | 6 AAR10796 6 AAR10795 6 AAR10794 6 AAR10793 6 AAR10792 | | | | | | |
| | 6 AAR10791 6 AAR10790 6 AAR10789 6 AAR10788 6 AAR10787 | | | | | | |
| | 6 AAR10786 6 AAR10785 6 AAR10784 6 AAR10783 6 AAR10782 | | | | | | |
| | 6 AAR10781 6 AAR10780 6 AAQ88403 10 AAQ88402 10 | | | | | | |
| | id = 40288320 36 AAQ55854 97 AAR14153 36 id = 92919472 97 | | | | | | |
| | AAR84614 95 AAR06948 36 AAR06947 36 id = 37993725 36 | | | | | | |
| | id = 37993723 36 id = 37993721 36 id = 37993719 36 id = 37993717 36 | | | | | | |
| | AAR06941 36 AAR06940 36 AAR06939 36 AAR06938 36 | | | | | | |
| | AAR06937 36 id = 37993705 35 id = 37993703 36 id = 37993701 36 | | | | | | |
| | id = 37993699 36 id = 37993697 36 AAR06931 36 AAQ00999 100 | | | | | | |
| | AAQ00998 97 AAP22087 97 AAP22086 97 AAP22089 97 | | | | | | |
| | AAP22088 96 AAP85247 6 AAP85246 6 AAP85245 6 AAP85244 6 | | | | | | |
| | AAP85243 6 AAP85242 6 AAP85241 6 AAP85240 6 AAP85239 6 | | | | | | |
| | AAP85238 6 AAP85237 6 AAP78942 95 AAP78941 95 | | | | | | |
| 2004 | 1S6NA 4 AAT11553 32 AAT11552 32 AAT11551 32 AAT11550 32 | 52 | 4.3 | 1.8 | low p < | 2,539 | 100 |
| | AAT11549 32 AAT11548 32 AAT11547 32 AAT11546 32 | | | | .001, | | |
| | AAT11545 32 AAT11544 32 AAT11543 32 AAT11542 32 | | | | prev | | |
| | AAT11541 32 AAT11540 32 AAT11539 32 AAT11538 32 | | | | p < .002 | | |
| | AAT11537 32 AAT11536 32 AAT11535 32 AAT11534 32 | | | | | | |
| | AAS75296 6 AAS75295 6 AAS75294 6 AAS75293 6 AAS75292 6 | | | | | | |
| | AAS75291 6 id = 51095222 108 AAU00153 96 id = 55669122 97 | | | | | | |
| | BAD34490 97 BAD34489 97 BAD34488 97 AAV68177 97 | | | | | | |
| | id = 73913544 106 id = 59876233 97 AAT92099 97 AAT92098 97 | | | | | | |
| | AAT02759 111 AAV52690 96 AAV52689 97 AAV52688 97 | | | | | | |
| | AAV52687 97 AAV49728 6 AAV49727 6 AAV49726 6 AAV49725 | | | | | | |
| | 6 AAV49724 6 AAW56064 97 AAW56066 97 AAW56065 97 | | | | | | |
| | AAW28871 97 | | | | | | |
| 2005 | ABC18309 8 ABC18308 9 ABC02196 3 1ZTXE 5 AAY67877 9 | 119 | 4.4 | 1.9 | low p < | 3,000 | 119 |
| | AAY67876 11 AAY67875 11 AAY67874 8 AAY67873 8 | | | | .001, | | |
| | AAY67872 8 AAY67871 8 AAY67870 8 AAY67869 8 AAY67868 8 | | | | prev | | |
| | AAY67867 8 AAY67866 8 AAY57985 8 ABB01532 97 AAZ32750 | | | | p > .50 | | |
| | 97 AAZ32749 97 AAZ32748 97 AAZ32747 97 AAZ32746 97 | | | | | | |
| | AAZ32745 97 AAZ32744 97 AAZ32743 97 AAZ32742 97 | | | | | | |
| | AAZ32741 97 AAZ32739 97 AAZ32737 97 AAZ32736 97 | | | | | | |
| | AAZ32734 97 AAZ32733 97 id = 71483607 97 id = 71483605 97 | | | | | | |
| | id = 71483603 97 id = 71483601 97 ABC40712 100 ABB01533 101 | | | | | | |
| | AAY55949 97 ABA62343 97 id = 63098704 36 id = 63098702 36 | | | | | | |
| | AAY29684 6 AAY29685 6 AAY29683 6 AAY29682 6 AAY29681 6 | | | | | | |
| | AAY29680 6 AAY29679 6 AAY29678 6 AAY29677 7 AAY29676 7 | | | | | | |
| | id = 84028433 111 id = 76446583 37 ABA43045 37 ABA43044 37 | | | | | | |
| | ABA43043 37 ABA43042 37 ABA43041 37 ABA43040 37 | | | | | | |
| | ABA43039 37 ABA43038 37 ABA43037 37 ABA43036 37 | | | | | | |
| | ABA43035 37 ABA43034 37 ABA43033 37 ABA43032 37 | | | | | | |
| | ABA43031 37 ABA43030 37 ABA43029 37 ABA43028 37 | | | | | | |
| | ABA43027 37 ABA43026 37 ABA43025 37 ABA43024 37 | | | | | | |
| | ABA43023 37 ABA43022 37 ABA43021 37 ABA43020 37 | | | | | | |
| | ABA43019 37 ABA43017 37 ABA43016 37 id = 76446521 37 | | | | | | |
| | id = 76446519 37 id = 76446517 37 id = 76446515 37 id = 76446513 37 | | | | | | |
| | ABA43010 37 ABA43009 37 ABA43008 37 ABA43007 37 | | | | | | |
| | ABA43006 37 id = 76446501 37 id = 76446499 37 id = 76446497 37 | | | | | | |
| | id = 76781572 105 id = 76781570 105 ABA54593 105 ABA54592 105 | | | | | | |
| | ABA54591 105 ABA54590 105 ABA54589 105 ABA54588 105 | | | | | | |
| | ABA54587 105 ABA54586 105 ABA54585 105 ABA54584 105 | | | | | | |
| | ABA54583 105 ABA54582 105 ABA54581 105 ABA54580 105 | | | | | | |
| | ABA54579 105 id = 76781538 105 id = 76781536 105 id = 76781534 | | | | | | |
| | 105 id = 76781532 105 AAY54162 97 | | | | | | |
| 2006 | ABI81406 34 ABI81405 34 ABI81404 34 ABI81403 34 ABI81402 | 279 | 6.4 | 1.4 | low p < | 4269 | 177 |
| | 34 ABI81401 34 ABI81400 34 ABI81399 34 ABI81398 34 | | | | .001, | | |
| | ABI81397 34 ABI81396 34 ABI81395 34 ABI81394 34 ABI81393 | | | | prev | | |
| | 34 ABI81392 34 ABI81391 34 ABI81390 34 ABI81389 34 | | | | p < .001 | | |
| | ABI81388 34 ABI81387 34 ABI81386 34 ABI81385 34 ABI81384 | | | | | | |
| | 34 ABI81383 34 ABI81382 34 ABI81381 34 ABI81380 34 | | | | | | |
| | ABI81379 34 ABI81378 34 ABI81377 34 ABI81376 34 ABI81375 | | | | | | |
| | 34 ABI81374 34 ABI81373 34 ABI81372 34 ABI81371 34 | | | | | | |
| | ABI81370 34 ABI81369 34 ABI81368 34 ABI81367 34 ABI81366 | | | | | | |
| | 34 ABI81365 34 ABI81364 34 ABI81363 34 ABI81362 34 | | | | | | |
| | ABI81361 34 ABI81360 34 ABI81359 34 ABI81358 34 ABI81357 | | | | | | |
| | 34 ABI81356 34 ABI81355 34 ABI81354 34 ABI81353 34 | | | | | | |
| | ABI81352 34 ABI81351 34 ABI81350 34 ABI81349 34 ABI81348 | | | | | | |
| | 34 ABI81347 34 ABI81346 34 ABI81345 34 ABI81344 34 | | | | | | |
| | ABI81343 34 ABI81342 34 ABI81341 34 ABI81340 34 ABI81339 | | | | | | |
| | 34 ABI81338 34 ABI81337 34 ABI81336 34 ABI81335 34 | | | | | | |
| | ABI81334 34 ABI81333 34 ABI81332 34 ABI81331 34 ABI81330 | | | | | | |
| | 34 ABI81329 34 ABI81328 34 ABI81327 34 ABI81326 34 | | | | | | |
| | ABI81325 34 ABI81324 34 ABI81323 34 ABI81322 34 ABI81321 | | | | | | |
| | 34 ABI81320 34 ABI81319 34 ABI81318 34 ABI81317 34 | | | | | | |
| | ABI81316 34 ABI81315 34 ABI81314 34 ABI81313 34 ABI81312 | | | | | | |
| | 34 ABI81310 34 ABI81308 34 ABI81307 34 ABI81306 34 | | | | | | |
| | ABI81305 34 ABI81304 34 ABI81303 34 ABI81302 34 ABI81301 | | | | | | |
| | 34 ABI81300 34 ABI81299 34 ABI81298 34 ABI81297 34 | | | | | | |
| | ABI81296 34 ABI81295 34 ABI81294 34 ABI81293 34 ABI81292 | | | | | | |
| | 34 ABI81291 34 ABI81290 34 ABI81289 34 ABI81288 34 | | | | | | |
| | ABI81287 34 ABI81286 34 ABI81285 34 ABI81284 34 ABI81283 | | | | | | |
| | 34 ABI81282 34 ABI81281 34 ABI81280 34 ABI81279 34 | | | | | | |
| | ABI81278 34 ABI81277 34 ABI81276 34 ABI81275 34 ABI81274 | | | | | | |
| | 34 ABI81273 34 ABI81272 34 ABI81271 34 ABI81270 34 | | | | | | |
| | ABI81269 34 ABI81268 34 ABI81267 34 ABI81266 34 ABI81265 | | | | | | |
| | 34 ABI81264 34 ABI81263 34 ABI81262 34 ABI81260 34 | | | | | | |
| | ABI81259 34 ABI81258 34 ABI81257 34 ABI81256 34 ABI81255 | | | | | | |
| | 34 ABI81254 34 ABI81253 34 ABI81252 34 ABI81251 34 | | | | | | |
| | ABI81250 34 ABI81249 34 ABI81248 34 ABI81247 34 ABI81246 | | | | | | |
| | 34 ABI81245 34 ABI81244 34 ABI81243 34 ABI81242 34 | | | | | | |
| | ABI81241 34 ABI81240 34 ABI81239 34 ABI81238 34 ABI81237 | | | | | | |
| | 34 ABI81236 34 ABI81235 34 ABI81234 34 ABI81233 34 | | | | | | |
| | ABI81232 34 ABI81231 34 ABI81230 34 ABI81229 34 ABI81228 | | | | | | |
| | 34 ABJ90133 32 ABJ90132 32 ABJ90131 32 ABJ90130 32 | | | | | | |
| | ABJ90129 32 ABJ90128 32 ABJ90127 32 ABJ90126 32 ABJ90125 | | | | | | |
| | 32 ABJ90124 32 ABJ90123 32 ABJ90122 32 ABJ90121 32 | | | | | | |
| | ABJ90120 32 ABJ90119 32 ABJ90118 32 ABJ90117 32 ABJ90116 | | | | | | |
| | 32 ABJ90115 32 ABJ90114 32 ABJ90113 32 ABJ90112 32 | | | | | | |
| | ABJ90111 32 ABJ90110 32 ABJ90109 32 ABJ90108 32 ABJ90107 | | | | | | |
| | 32 ABJ90106 32 ABJ90105 32 ABJ90104 32 ABJ90103 32 | | | | | | |
| | ABJ90102 32 ABJ90101 32 ABJ90100 32 ABJ90099 32 ABJ90098 | | | | | | |
| | 32 ABJ90097 32 ABJ90096 32 ABJ90095 32 ABJ90094 32 | | | | | | |
| | ABJ90093 32 ABJ90092 32 ABJ90091 32 ABJ90090 32 ABJ90087 | | | | | | |
| | 32 ABJ90086 32 ABJ90085 32 ABJ90084 32 ABJ90083 32 | | | | | | |
| | ABJ90082 32 ABJ90080 32 ABJ90079 32 ABJ90078 32 ABJ90077 | | | | | | |
| | 32 ABJ90076 32 ABJ90075 32 ABJ90074 32 ABJ90073 32 | | | | | | |
| | ABJ90072 32 ABJ90071 32 ABJ90070 32 ABJ90069 32 ABJ90068 | | | | | | |
| | 32 ABJ90067 32 ABJ90066 32 ABD85083 99 ABD85082 99 | | | | | | |
| | ABD85081 99 ABD85080 99 ABD85079 99 ABD85078 99 | | | | | | |
| | ABD85077 99 ABD85076 99 id = 90025142 99 id = 90025140 99 | | | | | | |
| | id = 90025138 99 id = 90025136 99 id = 90025134 99 ABD85070 99 | | | | | | |
| | ABD85069 99 ABD85068 99 ABD85067 99 ABD85066 99 | | | | | | |
| | ABD85065 99 ABD85064 99 ABG36517 36 ABD19513 97 | | | | | | |
| | ABD19512 96 ABD19511 97 ABD19510 97 ABI26622 40 ABI26621 | | | | | | |
| | 40 id = 89340787 97 id = 89340785 97 id = 89340783 97 ABD67759 97 | | | | | | |
| | ABD67758 97 ABD67757 97 ABD67756 97 ABD19642 97 | | | | | | |
| | id = 87116125 97 id = 87116123 97 2I69A 24 | | | | | | |
| 2007 | ABQ52692 97 ABO69610 36 ABO69609 36 ABO69608 36 | 20 | 5.3 | 0.6 | low p < | | |
| | ABO69607 36 ABO69606 36 ABO69605 36 ABO69604 36 | | | | .001, | | |
| | ABO69603 36 ABO69602 36 ABO69601 36 ABO69600 36 | | | | prev | | |
| | ABO69599 36 ABO69598 36 id = 134285072 36 id = 134285070 36 | | | | p < .001 | | |
| | id = 134285068 36 id = 134285066 36 id = 134285064 36 ABO69592 36 | | | | | | |

[0311] Upon analysis of Replikin Counts of publicly available sequences from the entire genome of WNV and comparison with WNV morbidity and mortality data from the United States Center for Disease Control, the applicants observed that the mean Replikin Count of WNV increased significantly between years 2000, 2004, 2005 and 2006, respectively. As seen in Table 11, the mean Replikin Count of 2.8±0 observed in 2000 was found to be significantly different (p<0.001) from the mean Replikin Count of 3.8±1.7 observed in 2004, the mean Replikin Count observed in 3.8±1.7 in 2004 was found to be significantly different (p<0.01) from the mean Replikin Count observed in 4.5±1.8 in 2005, and, finally, the mean Replikin Count observed in 4.5±1.8 in 2005 was found to be significantly different (p<0.001) from the mean Replikin Count observed in 6.0±1.1 in 2006.

TABLE 11
WNV Whole Genome

| | | | | Significance | | |
|---|---|---|---|---|---|---|
| | Accession | | | (compared to | | |
| | Records for | Replikin | Standard | previous listed | | |
| Year | WNV | Count | Deviation | year) | Morbidity | Mortality |
| 2000 | 2 | 2.8 | ±0.0 | | CDC 21 | CDC 2 |
| 2004 | 68 | 3.8 | ±1.7 | prev p < 0.001 | CDC 2,539 | CDC 100 |
| 2005 | 137 | 4.5 | ±1.8 | prev p < 0.01 | CDC 3000 | CDC 119 |
| 2006 | 211 | 6.0 | ±1.1 | prev p < 0.001 | CDC 4269 | CDC 177 |

[0312] In the summer of 2007, Applicants reviewed the data for the whole WNV genome in publicly available sequences as provided in Table 11 and expressly predicted that a virulent increase in infection of WNV would likely follow the significant increase observed between each of the analyzed years. Immediately after Applicants' prediction, the California Department of Public Health confirmed Applicants' prediction by reporting that infections of WNV in California through Aug. 2, 2007 had been three times greater than infections seen in the previous year and a health emergency for three California counties was declared.

[0313] The epidemiology and virology of WNV is different from the epidemiology and virology of some other viruses discussed herein such as influenza, FMDV, PRRSV and PCV. Nevertheless, a correlation between increases in Replikin Count in the WNV envelope protein and morbidity and mortality provides compounding data establishing a shared phenomenon of rapid replication and virulence with an overwhelming number of other tested viruses and organisms.

[0314] In WNV and the other viruses and pathogens described herein, prediction of epidemics and future outbreaks may be made, for example, by (1) reviewing the Replikin Counts of isolates of WNV and identifying a RPG, for example, and RPG in the envelope protein (e.g., SEQ ID NO: 245), (2) comparing the Replikin Counts in the RPG, in the protein or gene area containing the RPG, or in the whole virus genome for a particular year with Replikin Counts from other years. A significant increase in Replikin Count from one year to the next and preferably over one, two or three years provides predictive value of an emerging strain of WNV that may begin an outbreak of more highly virulent WNV. A WNV outbreak may be predicted within about six months to about one year or more from the observation of a significant increase in Replikin Count.

[0315] More preferably, an outbreak of WNV may be predicted within about six months to about one year from the observation of a significant increase in Replikin Count over two or three years or, as in inventors prediction in 2007, following the observation of strongly significant increases over several years such as wherein Replikin Counts between 2000, 2004 and 2006 had p values of less than at least 0.001 and frequently less than 0.001. As such, significant increases may be observed over a time period of more than one year, such as three, four, five or more years. An outbreak may likewise be predicted within about six months to about one year from the initial observation of an observable decrease in Replikin Count following a significant increase. Using this method, Applicants prospectively predicted the beginnings of a 2007 outbreak of WNV. The method may also employ isolates of individual strains or isolates of all strains of WNV.

[0316] An embodiment of the invention provides a segment of the genome or a protein or segment of a protein of the WNV in which the expressed gene or expressed gene segment has the highest concentration of Replikins, or Replikin Count (number of Replikins per 100 amino acids), when compared to other segments or named genes of the genome, namely the RPG. An RPG (SEQ ID NO: 245) in Accession No. ABA54585 is reported in Example 7 below. Twelve Replikin sequences (SEQ ID NOS: 246-257) are identified in the RPG diagnostic, preventive, therapeutic and predictive applications. These Replikin sequences are preferred embodiments of immunogenic compositions and vaccines. The invention further provides Replikin sequences within the identified RPG that are conserved in the genome over time and, as such, are available as relatively invariant preferred targets for diagnosis and manipulation of rapid replication and virulence in WNV through immunogenic responses and vaccines.

[0317] IX. Methods of Predicting and Treating Outbreaks of Porcine Reproductive and Respiratory Syndrome Virus (PRRSV) Using Replikin Sequences

[0318] An increase in Replikin concentration in PRRSV is predictive of an increase in virulence of the virus and allows for prediction of forthcoming outbreaks or increases in mortality. A review of publicly available amino acid sequences of isolates of PRRSV that demonstrate an increase in Replikin concentration in the genome or a genome segment, or in a protein or protein fragment of the virus over time or between isolates is used as a predictor of an increase in outbreaks and morbidity and mortality of pigs infected with PRRSV. Publicly available sequences for isolates of PRRSV from PubMed or other public or private sources may be analyzed by hand or using proprietary search tool software (ReplikinForecast™ from REPLIKINS LLC, Boston, Mass.).

[0319] The inventors have now identified a Replikin Peak Gene in the nucleocapsid protein of the Porcine Respiratory and Reproductive Syndrome Virus (PRRSV) and have demonstrated a correlation between increased Replikin Count in the nucleocapsid protein of PRRSV between 2004 and 2007 and major outbreaks of PRRSV in China. Example 8.

[0320] FIG. 13 illustrates Replikin Counts in the nucleocapsid protein of PRRSV (SEQ ID NO: 353). The Replikin Count is seen to increase between 2004 and 2007. This increase correlates with a major outbreak of Porcine Reproductive and Respiratory Syndrome in China. Further, standard deviation from the mean in 2005 is considerably larger than other years demonstrating a marked increase in Replikin Count was occurring in 2005. The large increase that was occurring in 2005 based on increases in standard deviation is confirmed as an increase in mean Replikin Count in 2006. The large standard deviation observed in 2005 indicates that more members of the class had increasing Replikin Counts. Standard deviation in 2005 was an early warning prior to the increase in the mean count in 2006 and 2007. A similar phenomenon is observable in FIG. 7. These data provide further confirmation of the predictive value of the RPG Replikin Count in viral outbreaks and provide specific support for RPG Replikin Count as a predictive tool in PRRSV and viruses in pigs generally.

[0321] The invention provides RPGs and Replikin sequences within the identified RPGs for diagnostic, preventive and therapeutic applications. For example, each Replikin sequences identified within an identified RPG in PRRSV and other viruses, organisms and malignancies is available for diagnostic and therapeutic applications including vaccines, immunogenic compositions and antibody therapies. The entire Replikin Peak Gene sequence or fragments thereof are likewise available for diagnostic, preventive, therapeutic and predictive applications. Further, the presence of the Replikin Peak Gene in an isolate of the virus is indicative of rapid replication.

[0322] As discussed herein, applicants have identified RPGs of available PRRSV isolates within the nucleocapsid protein of PRRSV. Identification of these RPGS is different, for example, from the Replikin Peak Gene previously identified by applicants in H5N1 influenza in one polymerase area, namely the RNA-directed RNA polymerase or pB1 protein. Identification of Replikin Peak Genes in different structures of different viruses is made possible through the strict criteria for a Replikin sequence as defined by the applicants. The proprietary software ReplikinForecast™ (licensable from REPLIKINS LLC, Boston, Mass.) provides an efficient survey of publicly available Replikin sequences and identification and isolation in silico of the Replikin Peak Gene.

[0323] The size of a Replikin Peak Gene, both in terms of the number of amino acids and the Replikin Count, will depend upon the size of the sequence of the entire genome, protein or fragment thereof that has been isolated and reported. The invention further provides Replikin sequences within the identified Replikin Peak Gene or Area that are conserved in the genome over time and, as such, are available as relatively invariant targets for diagnosis and manipulation of rapid replication and virulence in PRRSV.

[0324] Further, the following RPGs have been identified in PRRSV isolates from China reported at Accession Nos. AAM18565, AAP81809 and ABL60920, respectively:

(SEQ ID NO:341)

| | |
|---|---|
| (1) | k⁷ q⁸ q⁹ k¹⁰ k¹¹ k¹² k¹³ g¹⁴ n¹⁵ g¹⁶ q¹⁷ p¹⁸ |
| | v¹⁹ n²⁰ q²¹ l²² c²³ q²⁴ m²⁵ l²⁶ g²⁷ k²⁸ i²⁹ i³⁰ |
| | a³¹ q³² q³³ n³⁴ q³⁵ s³⁶ r³⁷ g³⁸ k³⁹ g⁴⁰ p⁴¹ g⁴² |
| | k⁴³ k⁴⁴ s⁴⁵ k⁴⁶ k⁴⁷ k⁴⁸ n⁴⁹ p⁵⁰ e⁵¹ k⁵² p⁵³ h⁵⁴ |
| | f⁵⁵ p⁵⁶ l⁵⁷ a⁵⁸ t⁵⁹ e⁶⁰ d⁶¹ d⁶² v⁶³ r⁶⁴ h⁶⁵ h⁶⁶ |
| | (China 2000) |

(SEQ ID NO:342)

| | |
|---|---|
| (2) | k⁷ q⁸ q⁹ k¹⁰ r¹¹ k¹² k¹³ g¹⁴ d¹⁵ g¹⁶ q¹⁷ p¹⁸ |
| | v¹⁹ n²⁰ q²¹ l²² c²³ q²⁴ m²⁵ l²⁶ g²⁷ k²⁸ i²⁹ i³⁰ |
| | a³¹ q³² q³³ n³⁴ q³⁵ s³⁶ r³⁷ g³⁸ k³⁹ g⁴⁰ p⁴¹ g⁴² |
| | k⁴³ k⁴⁴ n⁴⁵ k⁴⁶ k⁴⁷ k⁴⁸ n⁴⁹ p⁵⁰ e⁵¹ k⁵² p⁵³ h⁵⁴ |
| | f⁵⁵ p⁵⁶ l⁵⁷ a⁵⁸ t⁵⁹ e⁶⁰ d⁶¹ d⁶² v⁶³ r⁶⁴ h⁶⁵ h⁶⁶ |

(SEQ ID NO:343)

| | |
|---|---|
| (3) | k⁷ q⁸ q⁹ k¹⁰ k¹¹ k¹² k¹³ g¹⁴ n¹⁵ g¹⁶ q¹⁷ p¹⁸ |
| | v¹⁹ n²⁰ q²¹ l²² c²³ q²⁴ m²⁵ l²⁶ g²⁷ k²⁸ i²⁹ i³⁰ |
| | a³¹ q³² q³³ n³⁴ q³⁵ s³⁶ r³⁷ g³⁸ k³⁹ g⁴⁰ p⁴¹ g⁴² |
| | k⁴³ k⁴⁴ n⁴⁵ r⁴⁶ k⁴⁷ k⁴⁸ n⁴⁹ p⁵⁰ e⁵¹ k⁵² p⁵³ h⁵⁴ |
| | f⁵⁵ p⁵⁶ l⁵⁷ a⁵⁸ t⁵⁹ e⁶⁰ d⁶¹ d⁶² v⁶³ r⁶⁴ h⁶⁵ h⁶⁶ |
| (China 2006). | |

[0325] The identified RPG sequences are identical across the 2000, 2003 and 2006 isolates except for point mutations at positions 45 and 46 (underlined in bold). These sequences are, therefore, relatively invariant targets for diagnosis and manipulation of rapid replication and virulence in PRRSV and are available as vaccines against the disease.

[0326] Point mutations, such as in positions 45 and 46 in the above-listed Chinese isolates, provide excellent predictive capacity. In the highly virulent and fatal Chinese variant disclosed in 2006 at ABL60920 (SEQ ID NO: 343), the asparagine and arginine at positions 45 and 46 are the same residues in the same relative positions as asparagine and arginine at residues 21 and 22 in the RPG of the highly virulent PRRSV 2006 Mexican isolate publicly available at Accession No. ABF 19568 (comparable mutated residues underlined in bold):

(SEQ ID NO:344)

k¹⁴ g¹⁵ p¹⁶ g¹⁷ k¹⁸ k¹⁹ k²⁰ n²¹ r²² k²³ r²⁴ n²⁵
p²⁶ e²⁷ k²⁸ p²⁹ h³⁰ f³¹ p³² l³³ a³⁴ t³⁵ e³⁶ d³⁷
d³⁸ v³⁹ r⁴⁰ h⁴¹ h⁴².

[0327] These two RPG sequences are, therefore, especially predictive of virulence and are preferred sequences for immunogenic compositions and vaccines. Identification of these residues in other RPG sequences in PRRSV provides a high likelihood of virulence and an excellent target for attack of the virus through antibody therapies, vaccines and other treatments.

[0328] X. Methods of Predicting and Treating Outbreaks of Porcine Circovirus (PCV) Using Replikin Sequences

[0329] An increase in Replikin concentration in PCV is predictive of an increase in virulence of the virus and allows for prediction of forthcoming outbreaks or increases in mortality. A review of publicly available amino acid sequences of isolates of PCV that demonstrate an increase in Replikin concentration in the genome or a genome segment, or in a protein or protein fragment of the virus over time or between isolates is used as a predictor of an increase in outbreaks and morbidity and mortality of pigs infected with PCV. Publicly available sequences for isolates of PCV from PubMed or other public or private sources may be analyzed by hand or using software described herein.

[0330] Applicants have now established a correlation between Replikin Counts in PCV and an increase in virulence. Applicants reviewed publicly available amino acid sequences of isolates of PCV having accession numbers at www.pubmed.com and identified increases in Replikin Counts in the genome of the virus that predict an increase in outbreaks and mortality of pigs infected with PCV.

[0331] The data for FIG. 21 is provided in Table 25 in Example 15 below. A general increase in Replikin Count from 2000 through 2007 is observable and may be correlated with an increase in incidence of and mortality from the disease between 2000 and 2006 as reported in Canada. Further, the very large Replikin Count number in 1997 followed by a marked decrease in 1998 through 2000 may be correlated with the beginning of increased outbreaks in 2000. In other viruses, outbreaks have been observed about 1 to 3 years after a large increase in Replikin Count that is followed by a notable decrease thereafter. See, e.g., FIGS. 2, 3 and 9. The graph in FIG. 21 demonstrates a cyclical pattern of Replikin Counts that is reminiscent of the correlation of Replikin Count with epidemics shown, for example, in influenza and SARS in FIGS. 2, 3 and 9.

[0332] In particular, the Replikin Count of PCV is observed at 9.4 (±10.8) in 1997 and decreases rapidly to 2.9 (1.2) in 2000. Replikin Count then rises to 3.5 (±1.4) in 2002 and rises again to 3.9 (±1.2) through 2007. During this time period, the virulence and mortality observed in swine herds in Canada (with additional reported incidence in Central America) were increasing. The large standard deviation seen in 1997-1999 evidences a virus population that is undergoing rapid change in the concentration of Replikin sequences in the genome and points to forthcoming changes in virulence, morbidity and mortality.

[0333] Prediction of epidemics and future outbreaks may be made, for example, by reviewing the Replikin Counts of RPGs or other portions of isolates of PCV or PRRSV or other virus or pathogen and comparing the Replikin Counts for a particular year with Replikin Counts from other years. A significant increase in Replikin Count from one year to the next and preferably over one, two or three or more years provides predictive value of an emerging strain of PCV that may begin an outbreak of more highly virulent and/or more highly lethal PCV.

[0334] A PCV outbreak may be predicted within about six months to about one year or more from the observation of a significant increase in Replikin Count. More preferably, an outbreak of PCV may be predicted within about six months to about one year from the observation of a significant increase in Replikin Count over two or three years or following the observation of strongly significant increases over several years such as wherein Replikin Counts of PCV between 2000 and 2002 and between 2005 and 2007 increased with p values each year over lowest mean Replikin Count in the series of less than 0.001.

[0335] Significant increases may be observed over a time period of more than one year, such as three, four or five years or more. An outbreak may likewise be predicted within about six months to about one year or more from the initial observation of an observable decrease in Replikin Count following a notable increase. For example, the marked decrease from 1997 to 2000 in PCV Replikin Counts predicts the increase of incidence and mortality in viral infections beginning in 2000 and continuing through at least 2006 (morbidity and mortality data for 2007 have not been made available at this time). Using this method, Applicants, for example, prospectively predicted the beginnings of a 2007 outbreak of WNV. See FIG. 12.

[0336] The inventors have identified a Replikin Peak Gene in the replicase protein of the Porcine Circovirus (PCV). Examples of the identification of a Replikin Peak Gene (RPG) in an isolate of PCV in Manitoba, Canada in 1997 and an RPG in an isolated of PCV in China in 2007 are provided in Example 9 (SEQ ID NOS: 520 and 525). Example 9 demonstrates comparably high Replikin Counts of the identified RPGs and provides prediction that the isolated strains of the virus have high virulence. Example 9 further provides RPGs and Replikin sequences within the identified RPGs as targets for production of immunogenic compositions and vaccines.

[0337] The invention provides Replikin sequences within the identified Replikin Peak Gene gene or gene segment for diagnostic, preventive and therapeutic applications. SEQ ID NOS: 324-328 are Replikin sequences provided in an RPG from Accession No. AAC59472. See Example 9. SEQ ID NOS: 329-340 are provided in an RPG from Accession No. ABP68657. See Example 9. For example, each of the above-listed sequences as Replikin sequences identified within an identified RPG are available for diagnostic and therapeutic applications including vaccines and antibody therapies. The entire Replikin Peak Gene sequence or fragments thereof are likewise available for diagnostic, preventive, therapeutic and predictive applications. Further, the presence of the Replikin Peak Gene in an isolate of the virus is indicative of rapid replication.

[0338] Replikin Peak Genes (RPG) have also been identified in PCV isolates in Accession Nos. AAC98885, AAL01075 and ABP68667 (SEQ ID NOS: 481, 438, and 451). See Example 9. For each identified RPG, continuous, non-interrupted and overlapping Replikin sequences have been identified for predictive and therapeutic applications.

[0339] Applicants have to date identified RPGs of available PCV isolates both within open reading frame 1 in a putative replicase protein and within open reading frame 11 in a predicted 1.8 kD protein. Identification of Replikin Peak Genes in different structures of different viruses is made possible through the strict criteria for a Replikin sequence as defined by the applicants. The size of a Replikin Peak Gene, both in terms of the number of amino acids and the Replikin Count, will depend upon the size of the sequence of the entire genome, protein or fragment thereof that has been isolated and reported. The invention further provides Replikin sequences within the identified Replikin Peak Gene that are conserved in the genome over time and, as such, are available as relatively invariant targets for diagnosis and manipulation of rapid replication and virulence in PCV.

[0340] XI. Conservation of Replikin Structure Relates to Virulence and Lethality

[0341] The conservation of any structure is critical to whether that structure provides a stable invariant target to attack and destroy or to stimulate. Replikin sequences have been shown to generally be conserved. When a structure is tied in some way to a basic survival mechanism of the organism, the structures tend to be conserved. A varying structure provides an inconstant target, which is a good strategy for avoiding attackers, such as antibodies that have been generated specifically against the prior structure and thus are ineffective against the modified form. This strategy is used by influenza virus, for example, so that a previous vaccine may be quite ineffective against the current virulent virus.

[0342] Certain structures too closely related to survival functions, however, apparently cannot change constantly. An essential component of the Replikin structure is histidine (h), which is known for its frequent binding to metal groups in redox enzymes and is a probable source of energy needed for replication. Since the histidine structure remains constant, Replikin sequence structures remain all the more attractive a target for destruction or stimulation.

[0343] A. Replikin Conservation in HIV

[0344] Conservation of Replikin sequences has been observed in trans-activator (Tat) proteins in isolates of HIV. Tat (trans-activator) proteins are early RNA binding proteins regulating lentiviral transcription. These proteins are necessary components in the life cycle of all known lentivirases, such as the human immunodeficiency viruses (HIV). Tat is a transcriptional regulator protein that acts by binding to the trans-activating response sequence (TAR) RNA element and activates transcription Initiation and/or elongation from the LTR promoter. HIV cannot replicate without tat, but the chemical basis of this has been unknown. In the HIV tat protein sequence from 89 to 102 residues, we have found a Replikin that is associated with rapid replication in other organisms. The amino acid sequence of this Replikin is hclvckqkkglgisygrkk (SEQ ID NO: 3666) In fact, Applicants found that this Replikin is present in every HIV tat protein. Some tat amino acids are substituted frequently, as shown in Table 12, by alternate amino acids (in small size fonts lined up below the most frequent amino acid, the percentage of conservation for the predominant Replikin (hclvcfqkkglgisygrkk) (SEQ ID NO: 3314). These substitutions have appeared for most of the individual amino acids. However, the key lysine and histidine amino acids within the Replikin sequence, which define the Replikin structure, are conserved 100% in the sequence; while substitutions are common elsewhere in other amino acids, both within and outside the Replikin, none occurs on these key histidine amino acids. The sequences listed in Table 12 are SEQ ID NO: 3314 and the denoted variations of formula peptide SEQ ID NO: 3315.

[0345] The substitutions cannot be considered to be at random because amino acids were substituted except for the lysines and histidines which define the Replikin structure. It is not just that lysine per se is “immune” to substitution, because the lysine not 6 to 10 amino acids from another lysine was freely substituted, while those lysines which do define the Replikin structure were not substituted.

TABLE 12
HIV TAT Conservation (SEQ ID NOS: 3314 and 3671)

% Replikin CONSERVATION of each constituent amino acid in the first 117
different isolates of HIY tat protein as reported in PubMed:
38 (100) 57 86 (100) (100) 66 76 (100) 99 5749 (100) 94 (100) 97 98 85 97 99 (100)(100)(100)%
Neighboring
Amino acids tat Replikin
k (c) s y [(h) (c) l v (c) f q k (k) g (l) g i s y g (r) (k) (k)]
below are the amino acid substitutions observed for each amino acid above:

| | | | | | |
|---|---|---|---|---|---|
| h | c f | q i | l h t | a | a l y h q |
| r | w p | l l | i h | q | v |
| y | s | s | l m | r | s |
| i | | s | m s | | |
| s | | r | n | | |
| v | | | | | |
| a | | | | | |
| f | | | | | |
| p | | | | | |
| q | | | | | |

[0346] B. Conservation in Replikin Peak Genes in H5N1 in Humans and Chickens

[0347] A series of conserved Replikin sequences (SEQ ID NOS: 1-11 and 14) were isolated in silico by Applicants in human and chicken isolates of H5N1 influenza virus. SEQ ID NO: 1 was identified in the following accession numbers in the following years at the following amino acid residue positions: (1997) AAK49342 beginning at position 134, AAK49340, 134, AAF74320, 134, AAF74319, 134, AAF74318, 134, AAF74317, 134, AAK49344, 134, AAK49343, 134, AAK49341, 134, AAK49339, 134, AAK49338, 134; (1998) AAK49345, 134; (2003) BAE07200, 134; (2004) AAW59551, 131, AAW59549, 129, ABE97897, 123, ABE97896, 123, ABE97895, 123, ABE97892, 123, ABE97891, 123, AAV32651, 134, AAV32643, 134; (2005) ABG78563, 109, ABG78562, 109, ABF56657, 127, ABF56656, 127, ABF56655, 127; (2006) ABK34973, 134, ABL31779, 134, ABL31765, 134, ABL31754, 134, ABL07029, 134, ABL07018, 119, ABL07007, 134, ABI49406, 134, ABI36481, 134, ABI36470, 134, ABI36451, 134, and ABI36440, 134.

[0348] SEQ ID NO: 11 was identified in the following accession numbers in the following years at the following amino acid residue positions: (2003) BAE07200, beginning at position 19; (2004) AAW59551, 16, AAW59549, 14, ABE97897, 8, ABE97896, 8, ABE97895, 8, ABE97894, 8, ABE97893, 8, ABE97892, 8, ABE97891, 8, ABE97890, 8, ABE97889, 8, ABE97888, 8, AAV35115, 19, AAV32651, 19, AAV32643, 19; (2005) ABC72649, 19, ABF56657, 12, ABF56656, 12, ABF56655, 12; (2006) ABK34973, 19, ABL31779, 19, ABL31765, 19, ABL31754, 19, ABL31743, 19, ABI49414, 19, ABL07029, 19, ABL07018, 4, ABL07007, 19, ABI49406, 19, ABI36481, 19, ABI36470, 19, ABI36451, 19, ABI36440, 19, ABI36429, 19.

[0349] SEQ ID NO: 14 was identified in the following accession numbers in 2006 at the following amino acid residue positions: ABL31777, beginning at position 41, ABI49393, 41, ABL07016, 41, ABL07005, 41, ABI49404, 41, ABI36472, 41, ABI36461, 41, ABI36452, 41, ABI36441, 41, and ABI36430, 41.

[0350] SEQ ID NO: 14 was isolated in silico from the pB1 gene area sequence disclosed at Accession No. ABI36441 (SEQ ID NO: 15). Replikin sequences (SEQ ID NOS: 16-17) were identified in the amino-terminus. Replikin sequences (SEQ ID NOS: 18-32) were identified in the mid-molecule. No Replikin sequences were identified in the carboxy-terminus. Sixteen Replikin sequences in 90 amino acid residues gave a Replikin Count of 17.8.

[0351] SEQ ID NO: 14 was also isolated in silico from Accession No. ABI36430 (SEQ ID NO: 33). Replikin sequences (SEQ ID NOS: 34-35) were identified in the amino-terminus. Replikin sequences (SEQ ID NOS: 36-49) were identified in the mid-molecule. No Replikin sequences were identified in the carboxy-terminus.

[0352] SEQ ID NO: 14 was also isolated in silico from Accession No. ABL07027 (SEQ ID NO: 50). Replikin sequences (SEQ ID NOS: 51-52) were identified in the amino-terminus. Replikin sequences (SEQ ID NOS: 53-68) were identified in the mid-molecule. Replikin sequences (SEQ ID NO: 69-71) were identified in the carboxy-terminus.

[0353] SEQ ID NO: 2 was identified in the following accession numbers in the following years at the following amino acid residue positions: (1997) Q9WLS3, 184, O89749, 184, AAK49358, 184, AAF74316, 184, AAK49362, 184, AAK49357, 184, AAK49356, 184, CAB95863, 184; (2003) BAE07199, 184; and (2004) ABL97546, 184, ABE97545, 184, ABE97544, 184, ABE97543, 184, ABE97542, 184, ABE97540, 184, ABE97564, 179, ABC72648, 184, ABK34974, 184.

[0354] SEQ ID NO: 3 was identified in the following accession numbers in the following years at the following amino acid residue positions: (1997) Q9WLS3, 184, O89749, 184, AAK49358, 184, AAF74316, 184, AAF74315, 184, AAF74314, 184, AAK49362, 184, AAK493761, 184, AAK49359, 184, AAK49357, 184, AAK49356, 184, CAB95863, 184; (1998) AAK49363, 184; (2003) BAE07199, 184; (2004) ABE97546, 184, ABE97545, 184, AGE97544, 184, ABE97543, 184, ABE97542, 184, ABE97541, 184, ABE97540, 184, ABE97539, 184, ABE97538, 184, ABE97537, 184, ABE97536, 184, AAV35116, 184, AAV32644, 184; (2005) ABG78564, 184, ABC72648, 184; and (2006) ABK34974, 184.

[0355] SEQ ID NO: 7 was identified in the following accession numbers in the following years at the following amino acid residue positions: (2003) BAE07200, 128; (2004) AAW59551, 125, AAW59549, 123, ABE97897, 117, ABE97896, 117, ABE97895, 117, ABE97894, 117, ABE97893, 117, ABE97892, 117, ABE97891, 117, ABE97890, 117, ABE97889, 117, ABE97888, 117, AAV32651m 128, AAV32643, 128; (2005) ABG78563, 103, ABG78562, 103, ABF56657, 121, ABF56656, 121, ABF56655, 121; and (2006) ABL31779, 128, AB31765, 128, ABL31754, 128, ABL31743, 128, ABI49414, 128, ABI49395, 128, ABL07029, 128, ABI36470, 128, ABI36451, 128, ABI36440, 128, ABI36429, 128.

[0356] SEQ ID NO: 8 was identified in the following accession numbers in the following years at the following amino acid residue positions: (1997) Q9WLS3, 184, O89749, 184, AAK49360, 168, AAK49356, 168, AAF74316, 168, AAK49362, 168, AAK49359, 168, AAK49357, 168, AAK49356, 168, CAB5863, 168; (2003) BAE07199, 168; (2004) ABE97546, 168, ABE97545, 168, ABE97544, 168, ABE97543, 168, ABE97542, 168, ABE97541, 168, ABE97539, 168, ABE97538, 168, ABE97537, 168, ABE97536, 168, AAV35116, 168, AAV32644, 168; (2005) ABG78564, 163, ABC72648, 168; and (2006) ABK34974, 168.

[0357] The series of conserved Replikin sequences discussed above are preferred embodiments of the invention and are particularly useful as immunogenic compounds and vaccines and the presence of these sequences has particular predictive value for timing, geographic position and lethality of H5N1 outbreaks.

[0358] C. Conservation in Replikin Scaffolds in Influenza A strains

[0359] Table 13, below, provides support for the role of Replikin Scaffolds as Replikin Peak Genes in lethal outbreaks of influenza in humans and birds. In Table 13, the history of the Goose Replikin and its homologues are tracked from 1917 to the present outbreak of avian H5N1 virus. Table 13 demonstrates conservation of the “scaffold” homology of the Goose Replikin in virulent strains of influenza.

[0360] Table 13 illustrates the history, by year or smaller time period, of the existence in the protein structure of the Goose Replikin and its homologues in other influenza Replikins. Table 13 further illustrates the history of amino acid substitutions in those homologues and the conservation of certain amino acids of the Replikin structure which are essential to the definition of a Replikin and the function of rapid replication supplied by Replikins.

[0361] Table 13 illustrates a Fixed Replikin Peak Gene Scaffold with ordered non-random substitution in the 90 year conservation of influenza virus Replikin peptides, from a 1917 goose flu and 1918 human pandemic to a 2007H5N1 ‘Bird Flu’ homologue.

[0362] The Goose Replikin is a 29 amino acid peptide RPG in the hemagglutinin protein of influenza virus beginning with kk and ending with hh (SEQ ID NO: 3672). Replikins may contain overlapping Replikins. This Replikin Scaffold appears in the virus genome only when the Replikin count rises above 3, and disappears again when the clinical outbreak is over and the Replikin count declines to less than 3.

TABLE 13
Goose Replikin Scaffolds

[chemical structure]

[chemical structure]

[chemical structure]

[chemical structure]

[chemical structure]

[chemical structure]

[chemical structure]

[chemical structure]

[chemical structure]

[0363] D. Replikin Scaffold in 2007 Isolate of H1N1

[0364] A Replikin Scaffold hemagglutinin Replikin Peak Gene has now been identified in one human case of H1N1 isolated in 2007 in Thailand. This evidence suggests H1N1 is making a comeback. The H1N1 Replikin Scaffold that has been identified is knglypnlsksyannkekevlvlwgvhh (SEQ ID NO: 2011), which is associated with a whole hemagglutinin Replikin Count of 8.1, and Replikin Count in the RPG of 28. The Replikin Count in the RPG of the 2007 Thailand isolate is higher than the Replikin Count in the RPG of an H1N1 isolate from the 1918 pandemic, Accession No: IRUZL, which has a Replikin Count in its RPG of 19. Example 5 provides the inventors analysis of the 2007 Thailand isolate.

[0365] E. Homologous Replikin Scaffold Sequences in Influenza, WSSV, and TSV

[0366] The inventors have further established a relationship between virulent influenza virus and shrimp viruses WSSV and TSV in the Replikin Scaffold portions of the viruses as may be seen in Table 14 below. Although there is extensive substitution, several short Replikins of the Shrimp white spot syndrome virus demonstrates significant homologies to the influenza virus Replikin sequences, especially with regard to length and key lysine (k) and histidine (h) residues. Similar, but less extensive, homologies are seen in taura syndrome virus. These homologies suggest that the sequences are derived from a shared reservoir and/or that similar mechanisms of Replikin production are used in both virus groups.

TABLE 14
Shrimp White Spot and Taura Syndrome Scaffolding

[chemical structure]

[0367] TSV is less virulent than WSSV and the structure of the TSV Replikin Scaffold is less closely related to influenza virus than are the structures of WSSV Replikin Scaffolds. In year 2000, TSV had a Replikin concentration of 2.7. Between 2001 and 2004, TSV had a lower mean Replikin concentration, as low as 0.7, and its Replikin Scaffold disappeared. In 2005 the Replikin Scaffold reappeared, with an increase in lysines and histidines, and a commensurate increase in Replikin concentration to 1.8, followed by an increase in TSV outbreaks in 2006-2007. See Table 19.

[0368] F. Replikin Peak Genes Provide Increased Predictive and Therapeutic Capacity

[0369] Since the identification of the Replikin structure, correlation between increased concentrations of Replikin sequences and increased replication and virulence has been observed in a range of viruses and organisms. These observations are made more accurate by the present isolation in silico of Replikin Peak Genes. While increased concentration of Replikin sequences in the genome of a virus offers both advance warning and new targets for developing effective methods of predicting and treating viral outbreaks, identification of an increase in concentration of Replikin sequences in a Replikin Peak Gene of a genome or protein heightens the predictive capacity of the change in Replikin concentration and the efficacy of new targets.

[0370] For example, more precise predictions of increased virulence are now available through identification of a Replikin Peak Gene in, among other viruses, the H5N1 strain of influenza (FIGS. 1-6), west nile virus (FIG. 12) and foot and mouth disease virus (FIG. 11). In these and other viruses, increased concentration of Replikin sequences in the whole genome, in a protein of the genome, in a Replikin Peak Gene of the genome, or in a protein containing a RPG, offer both advance warning and new targets for developing effective methods of predicting and treating viral outbreaks.

[0371] By monitoring changes in concentrations of Replikin sequences in viral genomes generally, emerging viral diseases can be identified in virus reservoirs and vectors in advance of their appearance in animal or human hosts. Identification of the emerging viruses and the Replikin sequences within the virus genome allows for appropriate, advance control efforts, including isolation and quarantine, and provide sufficient time for the synthesis and testing of vaccines specific to the sequences of the emerging virus.

[0372] As discussed above, the inventors have identified the pB1 gene area of the H3N8 strains of influenza virus (SEQ ID NO 545) as the region of the genome of the virus having the highest concentration of Replikin sequences. A Replikin Peak Gene has also been identified in H5N1 influenza virus and has been correlated with epidemics, increased virulence, morbidity and human mortality. (FIGS. 1-6) Likewise, a Replikin Peak Gene has been identified in the VP1 protein of foot and mouth disease virus and has been correlated with outbreaks of the virus. FIG. 11. A second Replikin Peak Gene (or Replikin Peak Gene Area) has additionally been identified in a fragment of the VP1 protein of foot and mouth disease virus and two particular Replikin sequences within the Replikin Peak Gene Area of the virus have been correlated with virulence of foot and mouth disease virus (e.g., SEQ ID NOS: 124 and 130). A Replikin Peak Gene has also been identified in west nile virus (e.g., SEQ ID NO: 258). FIG. 12. Replikin Peak Genes have further been identified in the nucleocapsid protein of the porcine reproductive and respiratory syndrome virus and in Porcine Circovirus (e.g., SEQ ID NOS: 341 and 520, respectively). FIGS. 13 and 19.

[0373] The invention provides Replikin sequences within the identified Replikin Peak Gene gene or gene segment (gene area) for diagnostic, preventive and therapeutic applications. For example, each Replikin sequence identified within an identified RPG is available for diagnostic and therapeutic applications including vaccines and antibody therapies. The entire Replikin Peak Gene sequence or fragments thereof are likewise available for diagnostic, preventive, therapeutic and predictive applications. Further, the presence of the Replikin Peak Gene in an isolate of the virus is indicative of rapid replication. For each identified RPG, continuous, non-interrupted and overlapping Replikin sequences have been identified for predictive and therapeutic applications. The size of a Replikin Peak Gene or Replikin Peak Gene Area, both in terms of the number of amino acids and the Replikin Count, will depend upon the size of the sequence of the entire genome, protein or fragment thereof that has been isolated and reported.

[0374] The invention further provides Replikin sequences within the identified Replikin Peak Gene or Replikin Peak Gene Area that are conserved in the genome over time and, as such, are available as relatively invariant targets for diagnosis and manipulation of rapid replication and virulence in EIV.

[0375] Point mutations within an RPG provide excellent predictive capacity when the point mutation is correlated with high virulence and provide an excellent target for attack of the virus through antibody therapies, vaccines and other treatments, as well as excellent predictive capacity when such point mutations are identified in emerging strains of the virus.

[0376] A further aspect of the invention provides utilizing software that searches for Replikin Peak Genes and enables the discovery of the point or points in the genome that have the highest concentration of Replikins, the years in which they have occurred, the strain or strains in which they occur, the host or hosts in which they occur, the geographic locations in which they occur, their increase or decrease in the above years, strains, hosts and geographic locations and point or small mutations that are correlatable with virulence.

[0377] The in silico detection of the Replikin Peak Gene by software methodology now permits both host and geographic localization of upregulated Replikin gene activity both in viruses and in other organisms. As seen in this study, the annual RPG Replikin analysis, by its correlation with a function such as epidemic outbreak or increase in lethality, can for the first time actually provide evidence for the correlation with the function.

[0378] The Replikin count in the whole genome or RPG make possible the prediction in advance of epidemic outbreaks of high mortality infections, such as those caused by influenza viruses, as seen for H5N1 in FIGS. 1-6. Such detection and localization permits advance focused public health preparations for better protection of the host, whether animal or human, and give time for the production and testing of new vaccines. The high Replikin Count of the RPG has now been shown to be associated consistently with a high percent lethality in the host, whether the host is a plant, fish, shrimp, or vertebrate, including human cases of H5N1 bird flu. The increase in count was frequently detected one year or more before the outbreak was clinically apparent (FIGS. 2, 3, 10, 11, 19, etc.). Vaccines may now be produced that directly target rapid replication as represented structurally by the Replikins in the whole genome and concentrated in a Replikin Peak Gene, rather than, as now, being targeted at virus epitopes whose function is unknown.

[0379] It may be concluded that Replikins represent a specific class of peptides that are widely distributed, conserved, quantitative markers of lethality. While not wishing to be bound by theory, evidence from the apparent transfer of conserved Replikin structures between strains suggest they may be mobile agents of lethality, transferring horizontally between carrier viruses to reach multicellular hosts, where they may replicate rapidly with lethal consequences. As newly recognized targets for prevention and therapy, Replikins offer a platform from which specifically to control rapid replication and lethality of organisms and cells, without necessarily destroying them.

[0380] G. Conserved Replikins in PCV for Diagnostics and Therapies

[0381] In review of the publicly available sequences for Porcine Circovirus, the applicants have identified three Replikin sequences from Accession No. ABQ 10608 that are conserved across many isolates from 1997 or 1998 through 2007: kngrsgpqphk (SEQ ID NO: 345); hlqgfanfvkkqtfnk (SEQ ID NO: 346) and kkqtfnkvkwylgarch (SEQ ID NO: 347). Because these sequences are conserved, they have predictive value and provide novel and preferred targets for diagnostic and therapeutic applications such as, for example, vaccines. Furthermore, two of these sequences, hlqgfanfvkkqtfnk (SEQ ID NO: 346) and kkqtfnkvkwylgarch (SEQ ID NO: 347) are contained within the identified RPG of Accession No. ABQ 10608. These sequences, therefore, are of preferred value in predicting virulent strains when such strains contain the sequences. Also, the sequences provide preferred targets for diagnostic and therapeutic applications such as, for example, vaccines. Table 15 provides the accession numbers of isolates of PCV between 1997 and 2007 containing the conserved sequence kngrsgpqphk (SEQ ID NO: 345) and the amino acid position within the PCV protein sequence wherein the conserved Replikin sequence begins.

TABLE 15
Conserved PCV Sequence

| | |
|---|---|
| 1997 | AAC59462 position 5. |
| 1998 | AAC35330 position 5, AAC35320 position 5, AAC35309 position 5, AAC35298 position 5, |
| | CAA11157 position 5, AAC61860 position 5, AAC61741 position 5, AAC61739 position 5, |
| | AAC61737 position 5, AAD03086 position 5, AAD03071 position 5, AAD03061 position 5, |
| | NP_048061 position 5, AAD11928 position 5. |
| 1999 | BAA88133 position 5, AAD50432 position 5, AAD38398 position 5, AAG41226 position 5, |
| | AAD37776 position 5, AAD45580 position 5, AAF35304 position 5, AAF35302 position 5, |
| | AAF35300 position 5, AAF35298 position 5, AAF35296 position 5, AAF35294 position 5, |
| | AAF35292 position 5, AAD12308 position 5. |
| 2000 | CAC41085 position 5, CAC41084 position 5, CAC41083 position 5, AAL09364 position 5, |
| | AAL09363 position 5, AAF87238 position 5, AAF87236 position 5, AAF87234 position 5, |
| | AAF87232 position 5, AAF87230 position 5, AAF87228 position 5. |
| 2001 | AAK60462 position 5, AAL58397 position 5, BAB69441 position 5, BAB69437 position 5, |
| | BAB69432 position 5, AAK56300 position 5, AAK56298 position 5, AAK56296 position 5, |
| | AAL01075 position 5. |
| 2002 | AAM61272 position 5, AAM61262 position 5, AAM61268 position 5, AAM61266 position |
| | 5, AAM61270 position 5, AAM61264 position 5, AAO39760 position 5, AAM21847 |
| | position 5, AAM21846 position 5, AAM21845 position 5, AAM21844 position 5, |
| | AAO24128 position 5, AAO24124 position 5, AAO24122 position 5, AAO23147 position 5, |
| | AAO23145 position 5, AAN81597 position 5, AAN06826 position 5, AAN62769 position 5, |
| | AAN62767 position 5, AAN62765 position 5, AAL69968 position 5, AAM76057 position 5, |
| | Q8BB16 position 5. |
| 2003 | AAP51128 position 5, AAS65993 position 5, AAS65991 position 5, AAS65989 position 5, |
| | AAS65987 position 5, AAS65985 position 5, AAS65983 position 5, AAS65981 position 5, |
| | AAS65979 position 5, AAS65977 position 5, AAS65975 position 5, AAP83635 position 5, |
| | AAP83633 position 5, AAP83631 position 5, AAP83629 position 5, AAP83627 position 5, |
| | AAP83625 position 5, AAP83623 position 5, AAP83621 position 5, AAP83619 position 5, |
| | AAP83617 position 5, AAP83615 position 5, AAP83613 position 5, AAP83611 position 5, |
| | AAP83609 position 5, AAP83607 position 5, AAP83605 position 5, AAP83603 position 5, |
| | AAP83601 position 5, AAP83599 position 5, AAP83597 position 5, AAP83595 position 5, |
| | AAP83593 position 5, AAP83591 position 5, AAR03722 position 5, AAR03720 position 5, |
| | AAR03718 position 5, AAR03716 position 5, AAQ94098 position 5, AAQ94096 position 5, |
| | AAQ94094 position 5, AAQ94092 position 5, AAQ94090 position 5, AAQ94088 position 5, |
| | AAP44188 position 5, AAP44182 position 5, AAR97517 position 5, AAQ96327 position 5, |
| | AAQ23155 position 5, AAP42468 position 5, AAP42466 position 5, AAO61136 position 5, |
| | NP_937956 position 5, AAR03714 position 5. |
| 2004 | AAW78475 position 5, AAW78473 position 5, AAW78471 position 5, AAW78469 position |
| | 5, AAW78467 position 5, AAW78465 position 5, AAW78463 position 5, AAV34139 |
| | position 5, AAU87519 position 5, AAU87515 position 5, AAU87511 position 5, AAU87509 |
| | position 5, AAU34001 position 5, AAT97650 position 5, AAT97648 position 5, AAT97646 |
| | position 5, AAT36358 position 5, AAX49397 position 5, AAU01966 position 5, AAT72901 |
| | position 5, AAT58234 position 5, AAS45844 position 5, AAS45843 position 5, CAJ31064 |
| | position 5, AAU13780 position 5, AAX52911 position 5, AAU87505 position 5, AAT39479 |
| | position 5, AAT39460 position 5, AAT37493 position 5, AAS66198 position 5, AAS66196 |
| | position 5, AAS66194 position 5, AAS66192 position 5, AAS90297 position 5, AAS89260 |
| | position 5, CAF25171 position 5. |
| 2005 | ABJ98317 position 5, AAZ20800 position 5, AAZ20796 position 5, AAZ20794 position 5, |
| | AAW79865 position 5, ABC26025 position 5, ABA40480 position 5, AAZ78351 position 5, |
| | AAY40292 position 5, ABB29423 position 5, ABB29419 position 5, ABB29417 position 5, |
| | ABB29415 position 5, ABB29413 position 5, ABB29411 position 5, ABB29409 position 5, |
| | ABB29407 position 5, ABB29405 position 5, ABB29403 position 5, ABB29401 position 5, |
| | ABB29399 position 5, ABA60807 position 5, ABA60805 position 5, ABA40399 position 5, |
| | ABA40397 position 5, AAX10150 position 5, AAX62053 position 5, AAX62051 position 5, |
| | AAX62049 position 5, AAX62047 position 5, AAX62045 position 5, AAX62043 position 5, |
| | AAX62041 position 5, ABC75103 position 5, ABB20934 position 5, ABA26910 position 5, |
| | ABA26908 position 5, AAY34249 position 5. |
| 2006 | ABI29887 position 5, ABG21279 position 5, ABG21277 position 5, ABG21275 position 5, |
| | ABG21273 position 5, ABG21271 position 5, ABG21269 position 5, ABG21267 position 5, |
| | ABJ98319 position 5, ABI93799 position 5, ABI93797 position 5, ABD59347 position 5, |
| | ABD42928 position 5, ABM88864 position 5, ABM88862 position 5, ABM88860 position 5, |
| | ABI17537 position 5, ABI17535 position 5, ABI17533 position 5, ABI17531 position 5, |
| | ABI17529 position 5, ABI17527 position 5, ABI17525 position 5, ABI17523 position 5, |
| | ABG37023 position 5, ABF71465 position 5. |
| 2007 | ABQ10608 position 5, ABQ10606 position 5, ABQ10604 position 5, ABQ10603 position 5, |
| | ABP68669 position 5, ABP68665 position 5, ABP68661 position 5, ABP68657 position 5, |
| | ABP68655 position 5, ABP68651 position 5, ABP68647 position 5, ABP68645 position 5, |
| | ABP68643 position 5, ABP68641 position 5, ABP68639 position 5, ABP68635 position 5, |
| | ABP68633 position 5, ABP68631 position 5, ABP68629 position 5, ABP68627 position 5, |
| | ABP68625 position 5, ABP68623 position 5, ABP68621 position 5, ABP68619 position 5, |
| | ABP68617 position 5, ABP68615 position 5, ABO38130 position 5, ABM97550 position 5, |
| | ABQ63072 position 5, ABQ63070 position 5, ABQ63068 position 5, ABQ63066 position 5, |
| | ABQ63064 position 5, ABQ63062 position 5, ABQ51920 position 5, ABQ51918 position 5, |
| | ABR14585 position 5, ABP49176 position 5, ABP48091 position 5, ABP48089 position 5, |
| | ABP48087 position 5, ABP48085 position 5, ABP48083 position 5, ABP48081 position 5, |
| | ABO09999 position 5, ABO09997 position 5, ABO09995 position 5, ABO09993 position 5, |
| | ABO09991 position 5, ABO09989 position 5, ABO09987 position 5, ABP23690 position 5. |

[0382] Table 16 provides the accession numbers of PCV isolates between 1997 and 2007 containing the conserved sequence hlqgfanfvkkqtfnk (SEQ ID NO: 346) and the amino acid position within the PCV protein sequence wherein the conserved Replikin sequence begins.

TABLE 16
Conserved PCV Sequence

| | |
|---|---|
| 1997 | AAC59462 position 57. |
| 1998 | AAC35330 position 57, AAC35320 position 57, AAC35309 position 57, AAC35298 position |
| | 57, CAA11157 position 57, AAC61860 position 57, AAC61741 position 57, AAC61739 |
| | position 57, AAC61737 position 57, AAD03086 position 57, AAD03071 position 57, |
| | AAD03061 position 57, NP_048061 position 57, AAD11928 position 57. |
| 1999 | BAA88133 position 57, AAD50432 position 57, AAD38398 position 57, AAG41226 position |
| | 57, AAD37776 position 57, AAD45580 position 57, AAF35304 position 57, AAF35302 |
| | position 57, AAF35300 position 57, AAF35298 position 57, AAF35296 position 57, |
| | AAF35294 position 57, AAF35292 position 57, AAD12308 position 57. |
| 2000 | CAC41085 position 57, CAC41084 position 57, AAL09364 position 57, AAL09363 position |
| | 57, AAF87238 position 57, AAF87236 position 57, AAF87234 position 57, AAF87232 |
| | position 57, AAF87230 position 57, AAF87228 position 57. |
| 2001 | AAK60462 position 57, AAL58397 position 57, BAB69441 position 57, BAB69437 position |
| | 57, BAB69432 position 57, AAK56300 position 57, AAK56298 position 57, AAK56296 |
| | position 57, AAL01075 position 57. |
| 2002 | AAM61272 position 57, AAM61262 position 57, AAM61268 position 57, AAM61266 |
| | position 57, AAM61270 position 57, AAM61264 position 57, AAO39760 position 57, |
| | AAM21845 position 57, AAM21844 position 57, AAO24128 position 57, AAO24126 |
| | position 57, AAO24124 position 57, AAO24122 position 57, AAO23147 position 57, |
| | AAO23145 position 57, AAN81597 position 57, AAN06826 position 57, AAN62769 position |
| | 57, AAN62767 position 57, AAN62765 position 57, AAN16398 position 57, AAM83186 |
| | position 57, AAM76057 position 57, Q8BB16 position 57, AAO95302 position 57. |
| 2003 | AAP51128 position 57, AAS65993 position 57, AAS65991 position 57, AAS65989 position |
| | 57, AAS65987 position 57, AAS65985 position 57, AAS65983 position 57, AAS65981 |
| | position 57, AAS65979 position 57, AAS65977 position 57, AAS65975 position 57, |
| | AAP83635 position 57, AAP83633 position 57, AAP83631 position 57, AAP83629 position |
| | 57, AAP83627 position 57, AAP83625 position 57, AAP83623 position 57, AAP83621 |
| | position 57, AAP83619 position 57, AAP83617 position 57, AAP83615 position 57, |
| | AAP83613 position 57, AAP83611 position 57, AAP83609 position 57, AAP83607 position |
| | 57, AAP83605 position 57, AAP83603 position 57, AAP83601 position 57, AAP83599 |
| | position 57, AAP83597 position 57, AAP83595 position 57, AAP83593 position 57, |
| | AAP83591 position 57, AAR03722 position 57, AAR03720 position 57, AAR03718 position |
| | 57, AAR03716 position 57, AAQ94098 position 57, AAQ94096 position 57, AAQ94094 |
| | position 57, AAQ94092 position 57, AAQ94090 position 57, AAQ94088 position 57, |
| | AAP44188 position 57, AAP44185 position 57, AAP44182 position 57, AAR97517 position |
| | 57, AAQ96327 position 57, AAQ23155 position 57, AAP42468 position 57, AAP42466 |
| | position 57, AAP42464 position 57, AAO61136 position 57, NP_937956 position 57, |
| | AAR03714 position 57. |
| 2004 | AAW78475 position 57, AAW78473 position 57, AAW78471 position 57, AAW78469 |
| | position 57, AAW78467 position 57, AAW78465 position 57, AAW78463 position 57, |
| | AAV34139 position 57, AAU87519 position 57, AAU87517 position 57, AAU87515 position |
| | 57, AAU87513 position 57, AAU87511 position 57, AAU87509 position 57, AAU87507 |
| | position 57, AAU34001 position 57, AAU01913 position 57, AAT97650 position 57, |
| | AAT97648 position 57, AAT97646 position 57, AAT97644 position 57, AAT36358 position |
| | 57, AAX49397 position 57, AAU01966 position 57, AAT79579 position 57, AAT72901 |
| | position 57, AAS45844 position 57, AAS45843 position 57, CAJ31064 position 57, |
| | AAU13780 position 57, AAX52911 position 57, AAU87505 position 57, AAT39479 position |
| | 57, AAT39460 position 57, AAT37493 position 57, AAS66198 position 57, AAS66196 |
| | position 57, AAS66194 position 57, AAS66192 position 57, AAS66190 position 57, |
| | AAS90297 position 57, CAF25171 position 57. |
| 2005 | ABJ98317 position 57, ABA29241 position 57, AAZ20802 position 57, AAZ20800 position |
| | 57, AAZ20798 position 57, AAZ20796 position 57, AAZ20794 position 57, AAW79865 |
| | position 57, ABC26025 position 57, ABA40480 position 57, AAZ78351 position 57, |
| | AAX21515 position 57, ABB29423 position 57, ABB29421 position 57, ABB29419 position |
| | 57, ABB29417 position 57, ABB29415 position 57, ABB29413 position 57, ABB29411 |
| | position 57, ABB29409 position 57, ABB29407 position 57, ABB29405 position 57, |
| | ABB29403 position 57, ABB29401 position 57, ABB29399 position 57, ABA60807 position |
| | 57, ABA60805 position 57, ABA60803 position 57, ABA40399 position 57, ABA40397 |
| | position 57, AAZ66792 position 57, AAX10150 position 57, AAX62053 position 57, |
| | AAX62051 position 57, AAX62049 position 57, AAX62047 position 57, AAX62045 position |
| | 57, AAX62043 position 57, AAX62041 position 57, ABC75103 position 57, ABB20934 |
| | position 57, ABA26910 position 57, ABA26908 position 57, AAY34249 position 57. |
| 2006 | ABI29887 position 57, ABG21279 position 57, ABG21277 position 57, ABG21275 position |
| | 57, ABG21273 position 57, ABG21271 position 57, ABG21269 position 57, ABG21267 |
| | position 57, ABJ98319 position 57, ABI93799 position 57, ABI93797 position 57, |
| | ABD59347 position 57, ABD42928 position 57, ABM88864 position 57, ABM88862 position |
| | 57, ABM88860 position 57, ABI17537 position 57, ABI17535 position 57, ABI17533 |
| | position 57, ABI17531 position 57, ABI17529 position 57, ABI17527 position 57, ABI17525 |
| | position 57, ABI17523 position 57, ABG37023 position 57, ABF71465 position 57. |
| 2007 | ABQ10608 position 57, ABQ10606 position 57, ABQ10604 position 57, ABQ10603 position |
| | 57, ABP68669 position 57, ABP68667 position 57, ABP68665 position 57, ABP68663 |
| | position 57, ABP68661 position 57, ABP68659 position 57, ABP68657 position 57, |
| | ABP68655 position 57, ABP68653 position 57, ABP68651 position 57, ABP68649 position |
| | 57, ABP68645 position 57, ABP68643 position 57, ABP68641 position 57, ABP68639 |
| | position 57, ABP68637 position 57, ABP68635 position 57, ABP68633 position 57, |
| | ABP68629 position 57, ABP68619 position 57, ABP68617 position 57, ABP68615 position |
| | 57, ABO38130 position 57, ABM97550 position 57, ABQ63072 position 57, ABQ63070 |
| | position 57, ABQ63068 position 57, ABQ63066 position 57, ABQ63064 position 57, |
| | ABQ63062 position 57, ABQ51920 position 57, ABQ51918 position 57, ABR14585 position |
| | 57, ABP49176 position 57, ABP48091 position 57, ABP48089 position 57, ABP48087 |
| | position 57, ABP48083 position 57, ABP48081 position 57, ABO09997 position 57, |
| | ABO09995 position 57, ABO09993 position 57, ABO09991 position 57, ABO09989 position |
| | 57, ABO09987 position 57, ABP23690 position 57. |

[0383] Table 17 provides the accession numbers of PCV isolates between 1998 and 2007 containing the conserved sequence kkqtfnkvkwylgarch (SEQ ID NO: 347) and the amino acid position within the PCV protein sequence wherein the conserved Replikin sequence begins.

TABLE 17
Convserved PCV Sequence

| | |
|---|---|
| 1998 | AAC35330 position 66, AAC35320 position 66, AAC35309 position 66, AAC35298 |
| | position 66, CAA11157 position 66, AAC61860 position 66, AAC61739 position 66, |
| | AAC61737 position 66, AAD03086 position 66, AAD03071 position 66, AAD03061 |
| | position 66, NP_048061 position 66, AAD11928 position 66. |
| 1999 | AAG41226 position 66, AAD37776 position 66, AAD45580 position 66, AAF35304 |
| | position 66, AAF35302 position 66, AAF35300 position 66, AAF35298 position 66, |
| | AAF35296 position 66, AAF35294 position 66, AAF35292 position 66, AAD12308 |
| | position 66. |
| 2000 | CAC41085 position 66, CAC41084 position 66, AAF87238 position 66, AAF87236 |
| | position 66, AAF87234 position 66, AAF87232 position 66, AAF87230 position 66, |
| | AAF87228 position 66. |
| 2001 | AAL58397 position 66, BAB69441 position 66, BAB69437 position 66, BAB69432 |
| | position 66, AAK56300 position 66, AAK56298 position 66, AAK56296 position 66, |
| | AAL01075 position 66. |
| 2002 | AAM61272 position 66, AAM61262 position 66, AAM61268 position 66, AAM61266 |
| | position 66, AAM61270 position 66, AAM61264 position 66, AAO39760 position 66, |
| | AAM21845 position 66, AAM21844 position 66, AAO24128 position 66, AAO24124 |
| | position 66, AAO24122 position 66, AAN81597 position 66, AAN06826 position 66, |
| | AAN16398 position 66, AAM83186 position 66, AAL69968 position 66, AAM76057 |
| | position 66, Q8BB16 position 66. |
| 2003 | AAP51128 position 66, AAS65993 position 66, AAS65991 position 66, AAS65989 |
| | position 66, AAS65987 position 66, AAS65985 position 66, AAS65983 position 66, |
| | AAS65979 position 66, AAS65977 position 66, AAS65975 position 66, AAP83635 |
| | position 66, AAP83633 position 66, AAP83631 position 66, AAP83629 position 66, |
| | AAP83627 position 66, AAP83625 position 66, AAP83623 position 66, AAP83621 |
| | position 66, AAP83619 position 66, AAP83617 position 66, AAP83615 position 66, |
| | AAP83613 position 66, AAP83611 position 66, AAP83609 position 66, AAP83607 |
| | position 66, AAP83605 position 66, AAP83603 position 66, AAP83601 position 66, |
| | AAP83599 position 66, AAP83597 position 66, AAP83595 position 66, AAP83593 |
| | position 66, AAP83591 position 66, AAR03722 position 66, AAR03720 position 66, |
| | AAQ94098 position 66, AAQ94096 position 66, AAQ94094 position 66, AAQ94092 |
| | position 66, AAQ94090 position 66, AAQ94088 position 66, AAP44188 position 66, |
| | AAP44182 position 66, AAQ96327 position 66, AAQ23155 position 66, AAP42466 |
| | position 66, AAP42464 position 66, AAO61136 position 66. |
| 2004 | AAW78479 position 63, AAW78475 position 66, AAW78471 position 66, AAW78469 |
| | position 66, AAW78465 position 66, AAV34139 position 66, AAU87519 position 66, |
| | AAU87511 position 66, AAU87509 position 66, AAU34001 position 66, AAU01913 |
| | position 66, AAT97648 position 66, AAT97644 position 66, AAT36358 position 66, |
| | AAX49397 position 66, AAT72901 position 66, AAS45844 position 66, AAS45843 |
| | position 66, CAJ31064 position 66, AAU87505 position 66, AAT39479 position 66, |
| | AAT39460 position 66, AAT37493 position 66, AAS90297 position 66, AAS89260 |
| | position 66, CAF25171 position 66. |
| 2005 | ABJ98317 position 66, AAZ20802 position 66, AAZ20800 position 66, AAZ20798 |
| | position 66, AAZ20796 position 66, AAZ20794 position 66, AAW79865 position 66, |
| | AAY40292 position 66, ABB29423 position 66, ABB29421 position 66, ABB29419 |
| | position 66, ABB29417 position 66, ABB29415 position 66, ABB29413 position 66, |
| | ABB29411 position 66, ABB29409 position 66, ABB29407 position 66, ABB29405 |
| | position 66, ABB29403 position 66, ABB29401 position 66, ABB29399 position 66, |
| | ABA60807 position 66, ABA60805 position 66, ABA40399 position 66, ABA40397 |
| | position 66, AAZ66792 position 66, AAX10150 position 66, AAX62051 position 66, |
| | AAX62049 position 66, AAX62047 position 66, AAX62045 position 66, AAX62041 |
| | position 66, ABB20934 position 66, ABA26908 position 66, AAY34249 position 66. |
| 2006 | ABI29887 position 66, ABG21279 position 66, ABG21277 position 66, ABG21275 |
| | position 66, ABG21273 position 66, ABG21271 position 66, ABG21269 position 66, |
| | ABG21267 position 66, ABJ98319 position 66, ABI93799 position 66, ABD59347 |
| | position 66, ABD42928 position 66, ABI17537 position 66, ABI17535 position 66, |
| | ABI17533 position 66, ABI17531 position 66, ABI17529 position 66, ABI17527 position |
| | 66, ABI17525 position 66, ABI17523 position 66, ABG37025 position 63, ABG37023 |
| | position 66, ABF71465 position 66. |
| 2007 | ABQ10608 position 66, ABQ10606 position 66, ABQ10604 position 66, ABQ10603 |
| | position 66, ABP68669 position 66, ABP68665 position 66, ABP68661 position 66, |
| | ABP68653 position 66, ABP68651 position 66, ABP68643 position 66, ABP68641 |
| | position 66, ABP68629 position 66, ABP68619 position 66, ABP68617 position 66, |
| | ABP68615 position 66, ABO38130 position 66, ABQ63072 position 66, ABQ63070 |
| | position 66, ABQ63068 position 66, ABQ63066 position 66, ABQ63064 position 66, |
| | ABQ63062 position 66, ABQ51920 position 66, ABQ51918 position 66, ABR14585 |
| | position 66, ABP49176 position 66, ABP48091 position 66, ABP48089 position 66, |
| | ABP48087 position 66, ABP48083 position 66, ABO09999 position 66, ABO09991 |
| | position 66, ABO09989 position 66, ABP23690 position 66. |

[0384] XII. Relationship between Replikin Peak Gene and Lethality in Tobacco Mosaic Virus and Lung Malignancy

[0385] As established above, the Replikin Peak Gene correlates with activity of viruses such as pandemic influenza, Bird Flu, west nile virus and Bird Flu H5N1, among many others. It has surprisingly now been discovered that the highest activity to date of the Replikin Peak Gene was found in lung cancer (SEQ ID NO: 1741). Although viruses have been amply confirmed to be associated with the causation of several cancers since the work of Rous in sarcoma at the beginning of the last century, and viruses are the basis of current anti-cancer vaccines, how viruses are related to cancer is still not well understood. The antimalignin antibody in serum (AMAS) test is an FDA-permitted Medicare-approved early detection method for cancer that measures production of antibody against peptides containing a key Replikin sequence, namely, the glioma Replikin peptide, kagvaflhkk (SEQ ID NO: 3658), but how AMAS detects cancer regardless of cell type has not been fully understood. Results from separate studies in the areas of viruses and cancer now have converged with the isolation by the inventors of Replikins in both viruses and cancers that are concentrated in proteins where the concentration of Replikins has been related to rapid replication.

[0386] Higher Replikin Counts in RPGs have now been associated consistently with a higher percent lethality in the host; whether the host is a plant, fish, shrimp, or vertebrate, including human cases of H5N1 bird flu. The increase in count has frequently been detected one year or more before outbreaks have become clinically apparent. In addition to the correlation of high counts with virulence and lethality, structures specific to Replikins have been found by the inventors. For example, a 29-amino acid Replikin scaffold (beginning with SEQ ID NO: 3672) conserved for 90 years, appeared in the genome of successive influenza virus strains and each of the lethal pandemics and lethal H5N1 outbreaks. Additionally, repeating specific Replikin sequence signatures in RPGs of certain pathogens and malignancies have been identified and correlated with lethality. For example, an identical signature (SEQ ID NO: 1584) was found to repeat eleven times in the RPG of protozoan P. falciparum, 20 times in the RPG of tobacco mosaic virus which included exacerbated cell death in a pepper plant, with exacerbated cell death induced by Tobacco Mosaic virus, and 57 times (by overlapping) within 52 Replikins in the 18 amino acid RPG of non-small cell lung carcinoma.

[0387] While the inventors do not wish to be bound by theory, both of the above two studies support the impression that Replikins are mobile agents of lethality. Pathogenic viruses may just be the carrier of the lethal mobile agents. The highest Replikin Count in a Replikin Peak Gene that has to date been observed in highly lethal non-small cell lung cancer. The Replikin Count was observed to be 289 Replikin sequences per 100 amino acids. Other cancers, such as breast and ovarian have likewise been observed to have very high Replikin Counts in their Replikin Peak Genes with counts above 40 Replikin sequences per 100 amino acids. An RPG was identified and a Replikin Count of 129 was observed in Accession No. EAW84344 in lymphoblastic leukemia. An RPG was likewise identified and a Replikin Count of 23 was observed in Accession No. EAX09769 in myeloid leukemia.

[0388] Replikins chemically synthesized in the laboratory were found experimentally to be immuno-stimulants, producing strong antibody responses in chickens and rabbits. It appears that the antibodies measured in the AMAS test are against the Replikins' chemistry of rapid replication rather than the histological diagnosis of cancer or the cell type. Thus, for example, histologically proven prostate cancer that is “quiescent” (over 90% of such cancers) has low antibody levels in the AMAS test. But when these cells replicate rapidly, antibody levels measured by the AMAS test increase markedly. AMAS warning frequently precedes detection of the production of Prostate-Specific Antigen (PSA), an antigen that is frequently assayed because of its relationship to prostate cancer. AMAS probably precedes PSA because PSA measures protein fragments, the antigens that must be released by the cancer cells into the blood, while AMAS measures antibody to the peptide changes in the cancer cells, an earlier detectable event.

[0389] Since humans are host to and inhabited by thousands of viruses and bacteria that live symbiotically within the body, unless some event like rapid replication creates disease, no pathogenesis exists. Therefore, it may be important to learn how to control symbiosis between host humans and symbiotic viruses and bacteria without necessarily aiming to destroy the organism outright, especially when destruction proves difficult.

[0390] Peptides isolated from cancer cells grown in tissue culture have been found to contain Replikin sequences. When stimulated by anoxia, the cell number in these tissue cultures increased five-fold per week. Surprisingly, however, Replikin sequence concentration increased ten-fold per week (twice that of cell number), demonstrating a correlation of Replikin count with rapid replication in cancer tissue culture. When the structure of these Replikin-containing peptides was determined, separately synthesized chemically, and administered to rabbits, the peptides produced specific antimalignin antibodies in abundance. The production of antimalignin antibodies in response to the Replikin-containing peptides provided evidence to close the circle of confirmation that AMAS is measuring Replikins activity in malignancy.

[0391] In addition to early detection by the AMAS test of the activity of the group of Replikins that are unique to cancer, Replikins are widely distributed markers of, and probably agents of, lethality. As newly recognized targets for prevention and therapy, Replikins offer a platform from which to control rapid replication and lethality of organisms and cells, without necessarily destroying them.

[0392] XIII. Replikin Count Correlates with Virulence and Lethality in Shrimp Taura Syndrome Virus

[0393] Applicants have likewise demonstrated in a blind study using an independent laboratory testing taura syndrome virus (TSV) in shrimp that virulence and mortality in shrimp correlates with Replikin Count in TSV. The inventors analyzed the genome of the TSV of four main isolates from Hawaii, Belize, Thailand and Venezuela to provide predictions ranking the virulence and mortality rate of each isolate. An independent laboratory tested each isolate in shrimp and provided blind data on mortality. The data demonstrate a quantitative linear correlation between Replikin concentration and mortality. See Example 18. Despite differences in epidemiology, virology and host, all of these data lend further support for the value of Replikin concentration in predicting outbreaks of pathogens and lethality of pathogens and malignancies.

[0394] XIV. Replikin Concentration in Replikin Peak Gene of Ribonucleotide Reductase Gene Area Correlated with a WSSV Epidemic

[0395] An increase in Replikin concentration in white spot syndrome virus (WSSV) is predictive of an increase in virulence of the virus and allows for prediction of forthcoming outbreaks or increases in morbidity and, in extreme cases, mortality. A review of publicly available amino acid sequences of isolates of WSSV that demonstrate an increase in Replikin Count in the genome or a genome segment, or in a protein or protein fragment of the virus over time or between isolates is used as a predictor of an increase in outbreaks in shrimp. Publicly available sequences for isolates of WSSV from PubMed or other public or private sources may be analyzed by hand or using proprietary search tool software (ReplikinForecast™ available in the United States from REPLIKINS LLC, Boston, Mass.).

[0396] Applicants have established a correlation between Replikin concentrations in WSSV and an increase in virulence of the virus resulting in epidemics. Applicants reviewed publicly available amino acid sequences of isolates of WSSV having accession numbers at www.pubmed.com and have identified a remarkable increase in Replikin concentration in the Replikin Peak Gene of the ribonucleotide reductase gene area of the genome of the virus (e.g., SEQ ID NO: 669). The remarkable increase occurred just prior to a significant outbreak of WSSV in shrimp in 2001. FIG. 18 illustrates a correlation between increases in Replikin Count in WSSV genome in 2000 and a significant outbreak of WSSV in 2001. In 2000, a remarkably high Replikin concentration of 97.6 is observed in WSSV. In the Replikin Peak Gene identified in ribonucleotide reductase in an isolate from 2000, the Replikin concentration spikes as high as 110.7, providing an unmistakable predictive signal for the significant 2001 outbreak of WSSV that followed. Analysis of the ribonucleotide reductase sequence publicly available at Accession No. AAL89390 (SEQ ID NO: 668) is disclosed in Example 10.

[0397] A. Analysis of Annual Replikin Count of WSSV

[0398] Applicants analyzed publicly available sequences for isolates of WSSV from PubMed. The data is contained in Table 18 and graphically described in FIG. 18. Mean Replikin concentrations were determined for all amino acid sequences for WSSV with accession numbers publicly available at www.pubmed.com. The mean Replikin Count was then determined for all viruses isolated and reported in a particular year. Table WSSV provides the results of the Replikin Count analysis. Years with no data are not included in the table.

TABLE 18
WSSV Replikin Count

| | | | Mean | | |
|---|---|---|---|---|---|
| | PubMed Accession Number-Replikin | No. | Replikin | | |
| Year | Count | Isolates | Count | S.D. | Significance |
| 1995 | CAA88950 18 CAA91970 59 | 2 | 4.4 | 0.6 | low p < .10 |
| 1996 | CAE17687 160 CAB03144 29 | 3 | 6.0 | 2.6 | low p > .50, prev p < .30 |
| | CAB03173 31 | | | | |
| 1998 | ABA54417 48 | 1 | 6.2 | 0.0 | prev p > .50 |
| 2000 | | 529 | 97.6 | 0.0 | low p < .001 |

| | NP_478030 361 NP_478019 361 NP_478001 361 NP_477774 361 NP_477756 361 NP_477753 361 | | | | |
|---|---|---|---|---|---|
| | NP_477809 361 NP_477768 361 NP_477523 361 NP_477959 361 NP_478053 361 NP_478052 361 | | | | |
| | NP_478051 361 NP_478050 361 NP_478049 361 NP_478048 361 NP_478047 361 NP_478046 361 | | | | |
| | NP_478045 361 NP_478044 361 NP_478043 361 NP_478042 361 NP_478041 361 NP_478039 361 | | | | |
| | NP_478038 361 NP_478037 361 NP_478036 361 NP_478035 361 NP_478034 361 NP_478033 361 | | | | |
| | NP_478032 361 NP_478031 361 NP_478029 361 NP_478028 361 NP_478027 361 NP_478026 361 | | | | |
| | NP_478025 361 NP_478024 361 NP_478023 361 NP_478022 361 NP_478021 361 NP_478020 361 | | | | |
| | NP_478018 361 NP_478017 361 NP_478016 361 NP_478015 361 NP_478014 361 NP_478013 361 | | | | |
| | NP_478012 361 NP_478011 361 NP_478010 361 NP_478009 361 NP_478008 361 NP_478007 361 | | | | |
| | NP_478006 361 NP_478005 361 NP_478004 361 NP_478003 361 NP_478002 361 NP_478000 361 | | | | |
| | NP_477999 361 NP_477998 361 NP_477997 361 NP_477996 361 NP_477995 361 NP_477994 361 | | | | |
| | NP_477993 361 NP_477992 361 NP_477991 361 NP_477990 361 NP_477989 361 NP_477988 361 | | | | |
| | NP_477987 361 NP_477986 361 NP_477985 361 NP_477984 361 NP_477983 361 NP_477982 361 | | | | |
| | NP_477981 361 NP_477980 361 NP_477979 361 NP_477978 361 NP_477977 361 NP_477976 361 | | | | |
| | NP_477975 361 NP_477974 361 NP_477973 361 NP_477972 361 NP_477971 361 NP_477970 361 | | | | |
| | NP_477969 361 NP_477968 361 NP_477967 361 NP_477966 361 NP_477965 361 NP_477964 361 | | | | |
| | NP_477963 361 NP_477962 361 NP_477961 361 NP_477960 361 NP_477958 361 NP_477957 361 | | | | |
| | NP_477956 361 NP_477955 361 NP_477954 361 NP_477953 361 NP_477952 361 NP_477951 361 | | | | |
| | NP_477950 361 NP_477949 361 NP_477948 361 NP_477947 361 NP_477946 361 NP_477945 361 | | | | |
| | NP_477944 361 NP_477943 361 NP_477942 361 NP_477941 361 NP_477940 361 NP_477939 361 | | | | |
| | NP_477938 361 NP_477937 361 NP_477936 361 NP_477935 361 NP_477934 361 NP_477933 361 | | | | |
| | NP_477932 361 NP_477931 361 NP_477930 361 NP_477929 361 NP_477928 361 NP_477927 361 | | | | |
| | NP_477926 361 NP_477925 361 NP_477924 361 NP_477923 361 NP_477922 361 NP_477921 361 | | | | |
| | NP_477920 361 NP_477919 361 NP_477918 361 NP_477917 361 NP_477916 361 NP_477915 361 | | | | |
| | NP_477914 361 NP_477913 361 NP_477912 361 NP_477911 361 NP_477910 361 NP_477909 361 | | | | |
| | NP_477908 361 NP_477907 361 NP_477906 361 NP_477905 361 NP_477904 361 NP_477903 361 | | | | |
| | NP_477902 361 NP_477901 361 NP_477900 361 NP_477899 361 NP_477898 361 NP_477897 361 | | | | |
| | NP_477896 361 NP_477895 361 NP_477894 361 NP_477893 361 NP_477892 361 NP_477891 361 | | | | |
| | NP_477890 361 NP_477889 361 NP_477888 361 NP_477887 361 NP_477886 361 NP_477885 361 | | | | |
| | NP_477884 361 NP_477883 361 NP_477882 361 NP_477881 361 NP_477880 361 NP_477879 361 | | | | |
| | NP_477878 361 NP_477877 361 NP_477876 361 NP_477875 361 NP_477874 361 NP_477873 361 | | | | |
| | NP_477872 361 NP_477871 361 NP_477870 361 NP_477869 361 NP_477868 361 NP_477867 361 | | | | |
| | NP_477866 361 NP_477865 361 NP_477864 361 NP_477863 361 NP_477862 361 NP_477861 361 | | | | |
| | NP_477860 361 NP_477859 361 NP_477858 361 NP_477857 361 NP_477856 361 NP_477855 361 | | | | |
| | NP_477854 361 NP_477853 361 NP_477852 361 NP_477851 361 NP_477850 361 NP_477849 361 | | | | |
| | NP_477848 361 NP_477847 361 NP_477846 361 NP_477845 361 NP_477844 361 NP_477843 361 | | | | |
| | NP_477842 361 NP_477841 361 NP_477840 361 NP_477839 361 NP_477838 361 NP_477837 361 | | | | |
| | NP_477836 361 NP_477835 361 NP_477834 361 NP_477833 361 NP_477832 361 NP_477831 361 | | | | |
| | NP_477830 361 NP_477829 361 NP_477828 361 NP_477827 361 NP_477826 361 NP_477825 361 | | | | |
| | NP_477824 361 NP_477823 361 NP_477822 361 NP_477821 361 NP_477820 361 NP_477819 361 | | | | |
| | NP_477818 361 NP_477817 361 NP_477816 361 NP_477815 361 NP_477814 361 NP_477813 361 | | | | |
| | NP_477812 361 NP_477811 361 NP_477810 361 NP_477808 361 NP_477807 361 NP_477806 361 | | | | |
| | NP_477805 361 NP_477804 361 NP_477803 361 NP_477802 361 NP_477801 361 NP_477800 361 | | | | |
| | NP_477799 361 NP_477798 361 NP_477797 361 NP_477796 361 NP_477795 361 NP_477794 361 | | | | |
| | NP_477793 361 NP_477792 361 NP_477791 361 NP_477790 361 NP_477789 361 NP_477788 361 | | | | |
| | NP_477787 361 NP_477786 361 NP_477785 361 NP_477784 361 NP_477783 361 NP_477782 361 | | | | |
| | NP_477781 361 NP_477780 361 NP_477779 361 NP_477778 361 NP_477777 361 NP_477776 361 | | | | |
| | NP_477775 361 NP_477773 361 NP_477772 361 NP_477771 361 NP_477770 361 NP_477769 361 | | | | |
| | NP_477767 361 NP_477766 361 NP_477765 361 NP_477764 361 NP_477763 361 NP_477762 361 | | | | |
| | NP_477761 361 NP_477760 361 NP_477759 361 NP_477758 361 NP_477757 361 NP_477755 361 | | | | |
| | NP_477754 361 NP_477752 361 NP_477751 361 NP_477750 361 NP_477749 361 NP_477748 361 | | | | |
| | NP_477747 361 NP_477746 361 NP_477745 361 NP_477744 361 NP_477743 361 NP_477742 361 | | | | |
| | NP_477741 361 NP_477740 361 NP_477739 361 NP_477738 361 NP_477737 361 NP_477736 361 | | | | |
| | NP_477735 361 NP_477734 361 NP_477733 361 NP_477732 361 NP_477731 361 NP_477730 361 | | | | |
| | NP_477729 361 NP_477728 361 NP_477727 361 NP_477726 361 NP_477725 361 NP_477724 361 | | | | |
| | NP_477723 361 NP_477722 361 NP_477721 361 NP_477720 361 NP_477719 361 NP_477718 361 | | | | |
| | NP_477717 361 NP_477716 361 NP_477715 361 NP_477714 361 NP_477713 361 NP_477712 361 | | | | |
| | NP_477711 361 NP_477710 361 NP_477709 361 NP_477708 361 NP_477707 361 NP_477706 361 | | | | |
| | NP_477705 361 NP_477704 361 NP_477703 361 NP_477702 361 NP_477701 361 NP_477700 361 | | | | |
| | NP_477699 361 NP_477698 361 NP_477697 361 NP_477696 361 NP_477695 361 NP_477694 361 | | | | |
| | NP_477693 361 NP_477692 361 NP_477691 361 NP_477690 361 NP_477689 361 NP_477688 361 | | | | |
| | NP_477687 361 NP_477686 361 NP_477685 361 NP_477684 361 NP_477683 361 NP_477682 361 | | | | |
| | NP_477681 361 NP_477680 361 NP_477679 361 NP_477678 361 NP_477677 361 NP_477676 361 | | | | |
| | NP_477675 361 NP_477674 361 NP_477673 361 NP_477672 361 NP_477671 361 NP_477670 361 | | | | |
| | NP_477669 361 NP_477668 361 NP_477667 361 NP_477666 361 NP_477665 361 NP_477664 361 | | | | |
| | NP_477663 361 NP_477662 361 NP_477661 361 NP_477660 361 NP_477659 361 NP_477658 361 | | | | |
| | NP_477657 361 NP_477656 361 NP_477655 361 NP_477654 361 NP_477653 361 NP_477652 361 | | | | |
| | NP_477651 361 NP_477650 361 NP_477649 361 NP_477648 361 NP_477647 361 NP_477646 361 | | | | |
| | NP_477645 361 NP_477644 361 NP_477643 361 NP_477642 361 NP_477641 361 NP_477640 361 | | | | |
| | NP_477639 361 NP_477638 361 NP_477637 361 NP_477636 361 NP_477635 361 NP_477634 361 | | | | |
| | NP_477633 361 NP_477632 361 NP_477631 361 NP_477630 361 NP_477629 361 NP_477628 361 | | | | |
| | NP_477627 361 NP_477626 361 NP_477625 361 NP_477624 361 NP_477623 361 NP_477622 361 | | | | |
| | NP_477621 361 NP_477620 361 NP_477619 361 NP_477618 361 NP_477617 361 NP_477616 361 | | | | |
| | NP_477615 361 NP_477614 361 NP_477613 361 NP_477612 361 NP_477611 361 NP_477610 361 | | | | |
| | NP_477609 361 NP_477608 361 NP_477607 361 NP_477606 361 NP_477605 361 NP_477604 361 | | | | |
| | NP_477603 361 NP_477602 361 NP_477601 361 NP_477600 361 NP_477599 361 NP_477598 361 | | | | |
| | NP_477597 361 NP_477596 361 NP_477595 361 NP_477594 361 NP_477593 361 NP_477592 361 | | | | |
| | NP_477591 361 NP_477590 361 NP_477589 361 NP_477588 361 NP_477587 361 NP_477586 361 | | | | |
| | NP_477585 361 NP_477584 361 NP_477583 361 NP_477582 361 NP_477581 361 NP_477580 361 | | | | |
| | NP_477579 361 NP_477578 361 NP_477577 361 NP_477576 361 NP_477575 361 NP_477574 361 | | | | |
| | NP_477573 361 NP_477572 361 NP_477571 361 NP_477570 361 NP_477569 361 NP_477568 361 | | | | |
| | NP_477567 361 NP_477566 361 NP_477565 361 NP_477564 361 NP_477563 361 NP_477562 361 | | | | |
| | NP_477561 361 NP_477560 361 NP_477559 361 NP_477558 361 NP_477557 361 NP_477556 361 | | | | |
| | NP_477555 361 NP_477554 361 NP_477553 361 NP_477552 361 NP_477551 361 NP_477550 361 | | | | |
| | NP_477549 361 NP_477548 361 NP_477547 361 NP_477546 361 NP_477545 361 NP_477544 361 | | | | |
| | NP_477543 361 NP_477542 361 NP_477541 361 NP_477540 361 NP_477539 361 NP_477538 361 | | | | |
| | NP_477537 361 NP_477536 361 NP_477535 361 NP_477534 361 NP_477533 361 NP_477532 361 | | | | |
| | NP_477531 361 NP_477530 361 NP_477529 361 NP_477527 361 NP_477526 361 NP_477525 361 | | | | |
| | NP_477524 361 | | | | |
| 2005 | AAZ29239 9 XP_001681561 6 | 2 | 2.6 | 2.4 | low p > 0.20, prev p < 0.001 |
| 2006 | ABM92267 14 ABP01348 1 | 14 | 2.7 | 2.5 | low p < .001, prev p > .50 |
| | ABM64218 6 ABI34434 6 ABI93178 4 | | | | |
| | ABI93177 3 ABI93176 6 ABI93174 12 | | | | |
| | ABQ12866 3 ABD65308 2 ABD65303 | | | | |
| | 1 ABD65302 4 ABD65300 3 | | | | |
| | ABD65298 1 | | | | |
| 2007 | 2ED6_L 1 2ED6_K 1 2ED6_J 1 2ED6_I | 25 | 1.3 | 1.2 | low p < .001, prev p < .05 |
| | 1 2ED6_H 1 2ED6_G 1 2ED6_F 1 | | | | |
| | 2ED6_E 1 2ED6_D 1 2ED6_C 1 | | | | |
| | 2ED6_B 1 2ED6_A 1 ABQ12772 15 | | | | |
| | ABQ12773 3 ABQ12771 6 ABQ12770 | | | | |
| | 9 ABO69369 2 ABO69368 2 ABS00974 | | | | |
| | 5 ABS00973 1 ABQ44211 3 ABQ44210 | | | | |
| | 4 ABP52058 4 ABP52057 1 ABP52054 5 | | | | |

[0399] B. Prediction and Treatment of WSSV Outbreaks

[0400] Prediction of epidemics and future outbreaks may be made, for example, by reviewing the Replikin Counts of isolates of WSSV and comparing the Replikin Count for a particular year with Replikin Counts from other years. A significant increase in Replikin Count from one year to the next and preferably over one, two, three or five years or more provides predictive value of an emerging strain of WSSV that may begin an outbreak of more highly virulent WSSV. A WSSV outbreak may be predicted within about six months to about one year, to about three, to about five years or more from the observation of a significant increase in Replikin concentration. The outbreak is preferably predicted within about one to about three years and more preferably within about one to about two years. An outbreak of WSSV, therefore, may be predicted within 1 to about 2 years as demonstrated in FIG. 18 wherein an epidemic occurred at about 1 year following a remarkably significant increase in Replikin concentration and in particular in the identified Replikin Peak Gene.

[0401] Significant increases may be observed over a time period of more than one year, such as three, four, five or more years. An outbreak may likewise be predicted within about six months to about one year or more from the initial observation of an observable decrease in Replikin concentration following a notable increase.

[0402] The correlation between Replikin concentration and viral outbreaks noted above provide a method of predicting outbreaks of WSSV by monitoring increases or decreases in Replikin Count in the RPG of isolates of WSSV. The method may employ isolates of individual strains or isolates of all strains of WSSV.

[0403] XV. Replikin Count in TSV Epidemic

[0404] An increase in Replikin concentration in taura syndrome virus (TSV) is predictive of an increase in virulence and lethality of the virus and allows for prediction of forthcoming outbreaks or increases in lethality. FIG. 19 illustrates a correlation between increased Replikin Count in the genome of TSV and outbreaks of the virus in 2000 and 2007 in shrimp. The Replikin Count data reflected in the graph is found in Table 19. Significant outbreaks of the disease are noted at years 2000 and 2007. It may be observed from the graph that outbreaks of the virus occur following an increase in Replikin concentration. In year 2000, TSV had a Replikin concentration of 2.7. Between 2001 and 2004, TSV had a lower mean Replikin concentration, as low as 0.7, and an identified Replikin Scaffold disappeared. In 2005 the Replikin Scaffold reappeared, with an increase in lysines and histidines, and a commensurate increase in Replikin concentration to 1.8, followed by an increase in TSV outbreaks in 2006-2007.

TABLE 19
TSV Replikin Count

| | | No. of | Mean Replikin | | |
|---|---|---|---|---|---|
| | | Isolates | Concentration | | |
| Year | PubMed Accession Number-Replikin Count | per year | per year | S.D. | Significance |
| 2000 | NP_149058 70 NP_149057 70 AAK72221 70 | 5 | 2.7 | 1.3 | low p < 0.02 |
| | AAK72220 70 AAG44834 4 | | | | |
| 2001 | AAM73766 7 | 1 | 0.7 | 0.0 | prev p < 0.02 |
| 2002 | AN77089 2 AAN77088 2 AAN77087 2 AAN77086 2 | 8 | 0.7 | 0.4 | low p > 0.50 |
| | AAW32934 2 AAW32932 2 AAW32930 2 AAW32929 1 | | | | |
| 2003 | AAR11292 6 AAR11291 6 AAR11290 6 | 3 | 0.6 | 0.0 | prev p < 0.20 |
| 2004 | AAX07125 2 AAX07117 2 AAT81157 75 AAT81158 75 | 23 | 0.8 | 0.9 | low p < 0.40, |
| | AAX07127 2 AAX07126 2 AAX07124 2 AAX07123 2 | | | | prev p < 0.20 |
| | AAX07122 2 AAX07121 2 AAX07120 2 AAX07119 2 | | | | |
| | AAX07118 2 AAX07116 2 AAX07115 2 AAX07114 2 | | | | |
| | AAX07113 2 AAX07112 2 AAX35819 2 AAX35818 1 | | | | |
| | AAX35817 2 AAX35816 1 AAX35815 2 | | | | |
| 2005 | AAY56364 71 AAY56363 71 AAY44822 1 AAY44821 | 12 | 1.8 | 1.7 | low p < 0.02, |
| | 1 AAY44820 1 AAY44819 1 AAY44818 1 AAY44817 1 | | | | prev p < 0.05 |
| | AAY89097 83 AAY89096 83 ABB17263 63 ABB17264 | | | | |
| | 63 | | | | |

[0405] The TSV is less virulent than WSSV and the structure of the TSV Replikin Scaffold is less closely related to influenza virus than are the structures of WSSV Replikin Scaffolds.

[0406] XVI. Software

[0407] A further aspect of the invention provides utilizing software that searches for Replikin Peak Genes and enables the discovery of the point or points in the genome that have the highest concentration of Replikins, the years in which they have occurred, the strain or strains in which they occur, the host or hosts in which they occur, the geographic locations in which they occur, their increase or decrease in the above years, strains, hosts and geographic location and point or small mutations that are correlatable with virulence.

[0408] XVII. SARS Replikin Concentration Correlates with Epidemics

[0409] An increase in Replikin concentration in coronaviruses also correlates with the SARS coronavirus epidemic. In particular, as may be seen in FIG. 9, Replikin concentration in Spike and Nucleocapsid Coronavirus Proteins preceded the SARS Coronavirus Epidemic of 2003. In FIG. 9, the x-axis indicates the year and the y-axis indicates the Replikin concentration. The appearance of the SARS outbreak is shown by the shaded area in the graph between 2003 and 2004. The peak of the shaded area represents a total number of eight countries in which the SARS outbreak occurred in 2003. The solid black symbols represent the mean Replikin concentration for spike coronavirus proteins and the vertical black bars represent the standard deviation of the mean.

[0410] FIG. 9 shows a remarkable constancy of low coronavirus Replikin concentration between 1995 and 2001 in the spike proteins, followed by a dramatic increase in 2002, one year before the SARS epidemic appeared in 2003. Replikin concentration of the spike proteins in SARS then returned to their normal pre-2003 levels, which correlated with the disappearance of SARS.

[0411] XVIII. Passive Immunity

[0412] In another aspect of the invention, isolated Replikin peptides may be used to generate antibodies, which may be used, for example to provide passive immunity in an individual. Various procedures known in the art may be used for the production of antibodies to Replikin sequences. Such antibodies include but are not limited to polyclonal, monoclonal, chimeric, humanized, single chain, Fab fragments and fragments produced by a Fab expression library. Antibodies that are linked to a cytotoxic agent may also be generated. Antibodies may also be administered in combination with an antiviral agent. Furthermore, combinations of antibodies to different Replikins may be administered as an antibody cocktail.

[0413] Monoclonal antibodies to Replikins may be prepared by using any technique that provides for the production of antibody molecules. These include but are not limited to the hybridoma technique originally described by Kohler and Milstein, (Nature, 1975, 256:495-497), the human B-cell hybridoma technique (Kosbor et al., 1983, Immunology Today, 4:72), and the EBV hybridoma technique (Cole et al., Monoclonal Antibodies and Cancer Therapy, Alan R. Liss, Inc., pp. 77-96). In addition, techniques developed for the production of chimeric antibodies (Morrison et al., 1984, Proc. Nat. Acad. Sci USA, 81:6851-6855) or other techniques may be used. Alternatively, techniques described for the production of single chain antibodies (U.S. Pat. No. 4,946,778) can be adapted to produce Replikin-specific single chain antibodies.

[0414] Antibodies to any peptides observed to be present in an emerging or re-emerging strain of virus and combinations of such antibodies are useful in the treatment and/or prevention of viral infection, especially RPG peptides and Replikin sequences isolated within RPG peptides.

[0415] Antibody fragments that contain binding sites for a Replikin may be generated by known techniques. For example, such fragments include but are not limited to F(ab′)2 fragments which can be produced by pepsin digestion of the antibody molecules and the Fab fragments that can be generated by reducing the disulfide bridges of the F(ab′)2 fragments. Alternatively, Fab expression libraries can be generated (Huse et al., 1989, Science, 246:1275-1281) to allow rapid and easy identification of monoclonal Fab fragments with the desired specificity.

[0416] In another aspect of the invention, immune serum containing antibodies to one or more Replikins obtained from an individual exposed to one or more Replikins may be used to induce passive immunity in another individual or animal. Immune serum may be administered via i.v. to a subject in need of treatment. Passive immunity also can be achieved by injecting a recipient with preformed antibodies to one or more Replikins. Passive immunization may be used to provide immediate protection to individuals who have been exposed to an infectious organism. Administration of immune serum or preformed antibodies is routine and the skilled practitioner can readily ascertain the amount of serum or antibodies needed to achieve the desired effect. One of the reasons that vaccines directed towards a particular protein antigen of a disease causing agent have not been fully effective in providing protection against the disease (such as foot and mouth vaccine which has been developed against the VP1 protein or large segments of the VP1 protein) is that the best antibodies have not been produced, that is—it is likely that the antibodies to the Replikins have not been produced.

[0417] For example, either epitopes other than Replikins present in the larger protein fragments may interfere according to the phenomenon of antigenic primacy and/or because the hydrolysis of larger protein sequences into smaller sequences for processing to produce antibodies results in loss of integrity of any Replikin structure that is present, e.g., the Replikin is cut in two and/or the histidine residue is lost in the hydrolytic processing. The present studies suggest that for a more effective vaccine to be produced, the Replikin sequences, and no other epitope, should be used as the vaccine. For example, a vaccine of the invention can be generated using any one of the Replikin peptides identified by the three-point recognition system. A more preferred vaccine comprises at least one Replikin sequence isolated in an RPG. Another preferred vaccine comprises an RPG peptide. Among the preferred Replikin peptides for use in a virus vaccine are those conserved Replikins observed to “re-emerge” after an absence from the amino acid sequence for one or more years.

[0418] The Replikin peptides of the invention, alone or in various combinations are administered to a subject, preferably by i.v. or intramuscular injection, in order to stimulate the immune system of the subject to produce antibodies to the peptide. Generally the dosage of peptides is in the range of from about 0.1 μg to about 10 mg. In another embodiment, the dosage of the peptides is in the range from about 10 μg to about 1 mg. In a preferred embodiment, the dosage of the peptides is in the range from about 50 μg to about 500 μg. The skilled practitioner can readily determine the dosage and number of dosages needed to produce an effective immune response.

[0419] XIX. A Control Test of Reliability of Method of Predicting Outbreaks with Replikin Count

[0420] Table 3, which contains H5N1 data above, provides Replikin Count data across eight gene areas and an increased correlation is observed between mortality data and the whole virus, the polymerase gene and the pB1 gene area (Replikin Peak Gene). See also, e.g., FIGS. 4, 16 and 17. In addition to the correlative aspect of the increase in Replikin Count and percent mortality, the data in Table 3, and all of the other data contained herein, above provide strong confirmation of the power and validity of the methodology of predicting changes in virulence and outbreaks of virus with changes in Replikin concentration. These data represent an objective test of the method of independently selecting and examining several thousand individual accession numbers within approximately 12 million total accession numbers in PubMed wherein each selection is independently submitted to the PubMed database under a separate request using objective software. If there were not a reliable principle and a reliable method underlying each request, the potential for obtaining random results, or no results, or results which do not track each other at p<0.001 would markedly increase. Table 3 provides results wherein p was less than 0.001 between each group as compared one to another.

[0421] In Table 3 the structures that are correlated have, to the knowledge of the Applicants, not been correlated before, that is, the inventors have examined the relationship of one internal virus structure to another internal virus structure or structures (e.g., three-way relationship between whole virus gene area, polymerase and Replikin Peak Gene area) and have examined the external relation of these two or more internal structures to a host result of the virus infection, that is, percent mortality.

[0422] Table 3 represents consistent reproducible data, on repeated trials, which is the essence of the reliability of any method. For example, Table 3 provides independent data on (1) whole virus concentration of Replikins, (2) just polymerase concentration of Replikins, and (3) just the Replikin Peak Gene concentration of Replikins. The data is then correlated with H5N1 mortality three times, namely in 2003, 2004 and 2005. The absence of significant changes in the pA and pB2 gene areas provides a control. In each case, the method measures Replikin concentration three ways, each of which correctly predict mortality, independently, thereby confirming the method, and further illustrating in the process, the magnifying function of the Replikin Peak Gene.

### EXAMPLES

### Example 1

### Calculation of Replikin Count of Replikin Peak Gene of an isolate of H3N2 from the pandemic year of 1968

[0423] The inventors queried Accession No. ABB54523 at www.pubmed.com. Accession No. ABB54523 discloses the amino acid sequence of SEQ ID NO: 1664, deduced from the genomic information of an H3N2 strain of Influenza A virus isolated in 1968 in Memphis. Upon analysis of SEQ ID NO: 1664, the inventors observed a Replikin Peak Gene having continuous Replikin sequences beginning at residue 15 (histidine) and continuing through residue 85 (lysine) (SEQ ID NO: 1665).

[0424] The inventors isolated the RPG (SEQ ID NO: 1665) in silico. SEQ ID NO: 1665 was identified for diagnostic and therapeutic uses in, for example, an immunogenic compound and a therapeutic vaccine compound and as a predictive sequence for lethal outbreaks of influenza. Seventeen Replikin sequences (SEQ ID NOS: 1667-1682) were identified in the RPG of SEQ ID NO: 1665 for diagnostic, therapeutic and predictive uses as described herein. SEQ ID NOS: 1667-1674 were identified in the amino-terminal of the sequence disclosed in Accession No. ABB54523 (SEQ ID NO: 1664), SEQ ID NOS: 1675-1682 were identified in the mid-molecule of the sequence.

[0425] The Replikin Count of the amino acid sequence (SEQ ID NO: 1664) disclosed at ABB54523 was seventeen Replikin sequences in 90 total amino acids for a Replikin Count of 18.9. The Replikin Count of the RPG (SEQ ID NO: 1665) was seventeen Replikin sequences in 71 total amino acids for a Replikin Count of 23.9.

### Example 2

### Calculation of Replikin Count of Replikin Peak Gene of an isolate of human H5N1 from 2003

[0426] The inventors queried Accession No. BAE07199 at www.pubmed.com. Accession No. BAE07199 discloses an amino acid sequence deduced from the genomic information of the RNA polymerase gene of an H5N1 strain of Influenza A virus isolated in 2003 in Hong Kong. The inventors analyzed the whole pB1 gene area (SEQ ID NO: 1683) of the polymerase sequence. Upon analysis of SEQ ID NO: 1683, the inventors observed a Replikin Peak Gene having continuous Replikin sequences that begin at residue 168 (lysine) and continue through residue 215 (lysine).

[0427] The inventors isolated the RPG (SEQ ID NO: 1684) in silico. SEQ ID NO: 1684 was identified for diagnostic and therapeutic uses in, for example, an immunogenic compound and a therapeutic vaccine compound and as a predictive sequence for lethal outbreaks of influenza. Seven Replikin sequences (SEQ ID NOS: 1685-1691) were identified in the RPG of SEQ ID NO: 1684 for diagnostic, therapeutic and predictive uses as described herein. Replikin sequences SEQ ID NOS: 1685-1691 were identified in the amino-terminal of the sequence disclosed in Accession No. BAE07199 (SEQ ID NO: 1683), Replikin sequences SEQ ID NOS: 1692-1694 were identified in the mid-molecule of the sequence, and Replikin sequence SEQ ID NOS: 1695-1699 were identified in the carboxy-terminal of the sequence.

[0428] The Replikin Count of the whole pB1 area sequence (SEQ ID NO: 1683) was 15 Replikin sequences in 757 total amino acids for a Replikin Count of 2.0. The Replikin Count of the RPG (SEQ ID NO: 1684) was seven Replikin sequences in 48 total amino acids for a Replikin Count 14.6.

### Example 3

### Calculation of Replikin Count of the pB1 Gene Area and pB1-F2 Sub-Gene Area of an Isolate of Human H5N1 from Indonesia in 2006

[0429] The inventors queried Accession No. ABI36257 at www.pubmed.com. Accession No. ABI36257 discloses an amino acid sequence deduced from the genomic information of the pB1 gene area of an H5N1 strain of Influenza A virus isolated in 2006 from Indonesia. The inventors analyzed the pB1-F2 gene area (SEQ ID NO: 1700). Upon analysis of SEQ ID NO: 1700, the inventors observed a Replikin Peak Gene having continuous Replikin sequences that begin at residue 15 (histidine) and continue through residue 85 (lysine) (SEQ ID NO: 1701).

[0430] The inventors isolated the RPG (SEQ ID NO: 1701) in silico for diagnostic and therapeutic uses in, for example, an immunogenic compound and a therapeutic vaccine compound and as a predictive sequence for lethal outbreaks of influenza. Sixteen Replikin sequences (SEQ ID NOS: 1702-1717) were identified in the RPG of SEQ ID NO: 1701 for diagnostic, therapeutic and predictive uses as described herein. Replikin sequences SEQ ID NOS: 1702-1703 were identified in the amino-terminal of the sequence of SEQ ID NO: 1701, Replikin sequences SEQ ID NOS: 1704-1717 were identified in the mid-molecule of the sequence, and no Replikin sequences were identified in the carboxy-terminal.

[0431] The Replikin Count of the whole pB1-F2 gene area sequence (SEQ ID NO: 1700) was 16 Replikin sequences in 90 total amino acids for a Replikin Count of 17.8. The Replikin Count of the RPG pB1-F2 subgene area (SEQ ID NO: 1701) was 16 Replikin sequences in 71 total amino acids for a Replikin Count 22.57.

### Example 4

### Calculation of Replikin Count of the pB1 gene area and pB1-F2 sub-gene area of an isolate of human H5N1 from Indonesia in 2007

[0432] The inventors queried Accession No. ABM90520 at www.pubmed.com. Accession No. ABM90520 discloses an amino acid sequence deduced from the genomic information of the pB1 gene area of an H5N1 strain of Influenza A virus isolated in 2007 in Indonesia. The inventors analyzed the pB1 gene area (SEQ ID NO: 1722). Upon analysis of SEQ ID NO: 1722, the inventors observed a Replikin Peak Gene having continuous Replikin sequences that begin at residue 15 (histidine) and continue through residue 85 (lysine) in the pB1-F2 gene area (SEQ ID NO: 1723)

[0433] The inventors isolated the RPG (SEQ ID NO: 1723) in silico. SEQ ID NO: 1723 was identified for diagnostic and therapeutic uses in, for example, an immunogenic compound and a therapeutic vaccine compound and as a predictive sequence for lethal outbreaks of influenza. Sixteen Replikin sequences (SEQ ID NOS: 1724-1739) were identified in the RPG (or pB1-F2 gene subarea) of SEQ ID NO: 1723 for diagnostic, therapeutic and predictive uses as described herein. Replikin sequences SEQ ID NOS: 1724-1725 were identified in the amino-terminal of the sequence of SEQ ID NO: 1723, Replikin sequences SEQ ID NOS: 1726-1739 were identified in the mid-molecule of the sequence, and no Replikin sequences were identified in the carboxy-terminal.

[0434] The Replikin Count of the whole pB1-F2 area sequence (SEQ ID NO: 1722) was 16 Replikin sequences in 90 total amino acids for a Replikin Count of 17.8. The Replikin Count of the RPG (SEQ ID NO: 1723) was 16 Replikin sequences in 71 total amino acids for a Replikin Count 22.5.

### Example 5

### Calculation of Replikin Count of the RPG of a 2007H1N1 Isolate from Thailand Having a Replikin Scaffold

[0435] The inventors queried Accession No. ABS71678 at www.pubmed.com. Accession No. ABS71678 discloses an amino acid sequence deduced from the genomic information of the hemagglutinin gene area of an H1N1 strain of Influenza A virus isolated in 2007 in Thailand. The inventors analyzed the amino acid sequence provided at ABS71678 (SEQ ID NO: 1995). Upon analysis of SEQ ID NO: 1995, the inventors observed a Replikin Peak Gene having continuous Replikin sequences that begin at residue 143 (histidine) and continue through residue 235 (lysine) (SEQ ID NO: 1996). A Replikin Scaffold, knglypnlsksyannkekevlvlwgvhh (SEQ ID NO: 2011) was observed within the RPG.

[0436] The inventors isolated the RPG (SEQ ID NO: 1996) in silico. SEQ ID NO: 1996 was identified for diagnostic and therapeutic uses in, for example, an immunogenic compound and a therapeutic vaccine compound and as a predictive sequence for lethal outbreaks of influenza. Twenty-six Replikin sequences (SEQ ID NOS: 1999-2024) were identified in the RPG of SEQ ID NO: 1996 for diagnostic, therapeutic and predictive uses as described herein. Replikin sequences SEQ ID NOS: 1997-2016 were identified in the amino-terminal of the sequence of SEQ ID NO: 1995, Replikin sequences SEQ ID NOS: 2017-2029 were identified in the mid-molecule of the sequence, and SEQ ID NOS: 2030-2042 were identified in the carboxy-terminal. The Replikin sequences were isolated for diagnostic, therapeutic and predictive uses.

[0437] The Replikin Count of the whole hemagglutinin sequence (SEQ ID NO: 1995) was 46 Replikin sequences in 564 total amino acids for a Replikin Count of 8.1. The Replikin Count of the RPG area (SEQ ID NO: 1996) was 26 Replikin sequences in 93 total amino acids for a Replikin Count of 28.

### Example 6

### Replikin Peak Gene Identification in EIV Isolate Reported at Accession No. ABS89395

[0438] Applicants reviewed Replikin sequences publicly available at www.pubmed.com to determine the Replikin Peak Gene Area of available isolates. A Replikin Peak Gene was identified in the pB1-F2 gene area of the virus in Accession No. ABS89395 at www.pubmed.com. The following example provides determination of the Replikin Peak Gene in a 2005 isolate of a Maryland strain of H3N8 serotype Influenza A virus.

[0439] The inventors queried Accession No. ABS89395 and analyzed the amino acid sequence provided (SEQ ID NO: 545). Upon analysis of the sequence, the inventors observed a Replikin Peak Gene having continuous Replikin sequences that begin at residue 15 (histidine) and continue through residue 85 (lysine) (SEQ ID NO: 546).

[0440] The inventors isolated the RPG (SEQ ID NO: 546) in silico and identified the sequence for diagnostic and therapeutic uses in, for example, an immunogenic compound and a therapeutic vaccine compound and as a predictive sequence for lethal outbreaks of tuberculosis. Sixteen Replikin sequences (SEQ ID NOS: 547-562) were identified in the RPG for diagnostic, therapeutic and predictive uses as described herein. Replikin sequences SEQ ID NOS: 547-548 were identified in the amino-terminal of the sequence, Replikin sequences SEQ ID NOS: 549-562 were identified in the mid-molecule of the sequence, and no Replikins were identified in the carboxy-terminal.

[0441] The Replikin Count of the whole pB1-F2 sequence (SEQ ID NO: 545) was 16 Replikin sequences in 90 total amino acids for a Replikin Count of 17.8. The Replikin Count of the RPG area (SEQ ID NO: 546) was 16 Replikin sequences in 71 total amino acids for a Replikin Count of 22.5.

### Example 7

### Replikin Peak Gene Identification in West Nile Virus Isolate Reported in Accession No. ABA54585

[0442] Applicants reviewed Replikin sequences publicly available at www.pubmed.com to determine the Replikin Peak Gene of an available West Nile Virus (WNV) isolate. The entire envelope protein of WNV was reported at Accession No. ABA54585. A Replikin Peak Gene was identified in the 3,433 amino acid polyprotein sequence of the WNV envelope protein. A Replikin Peak Gene was identified beginning at amino acid residue 2797 extending through amino acid residue 2836 (a total of 40 amino acid residues). The number of Replikin sequences in this section was 12. The Replikin Count (Replikins per 100 amino acids) was 30. The Replikin Peak Gene (RPG) of the envelope protein of WNV is SEQ ID NO: 258 and the RPG contains 12 uninterrupted Replikins (SEQ ID NOS: 246-257).

### Example 8

### Calculation of RPGs in Porcine Respiratory Syndrome Virus

[0443] Applicants reviewed Replikin sequences publicly available at www.pubmed.com to determine the Replikin Peak Gene Area of available PRRSV isolates. A Replikin Peak Gene was identified in Accession No. AA043261 from mRNA encoding a reported nucleocapsid protein of a PRRSV isolate from Mexico in 2003. The inventors analyzed the amino acid sequence provided in Accession No. AA043261, which is reported with 123 amino acids within ORF 7 of the virus genome. Upon analysis of the sequence, the inventors observed a Replikin Peak Gene having continuous Replikin sequences that begin at residue 7 (lysine) and continue through residue 66 (histidine).

[0444] The inventors isolated the RPG (SEQ ID NO: 394) in silico and identified the sequence for diagnostic and therapeutic uses in, for example, an immunogenic compound and a therapeutic vaccine compound and as a predictive sequence for outbreaks of PRRSV. Seven Replikin sequences (SEQ ID NOS: 395-401) were identified in the RPG for diagnostic, therapeutic and predictive uses as described herein. SEQ ID NO: 395 was identified in the amino-terminal portion of the sequence and SEQ ID NOS: 396-401 were identified in the mid-molecule portion of the sequence.

[0445] The Replikin Count of the whole nucleocapsid sequence at Accession No. AA043261 was 7 Replikin sequence in 123 amino acid residues or 5.7. The Replikin Count of the RPG area (SEQ ID NO: 394) was 7 Replikin sequences in 60 total amino acids for a Replikin Count of 11.7.

[0446] The asparagine and methionine residues at positions 45 and 46 of the RPG (SEQ ID NO: 394) were identified by the inventors as non-conserved positions within the RPG as compared to other reported nucleocapsid sequences such as Accession No. ABF19568 discussed immediately below. Non-conserved positions within an RPG that are correlated with changes in lethality and/or virulence are particularly useful in methods of the invention to predict outbreaks. The presence of these point mutations in other PRRSV nucleocapsid RPG sequences provides evidence of greater virulence and/or lethality.

[0447] A Replikin Peak Gene was also identified in Accession No. ABF19568 from a nucleic acid sequence of a PRRSV 2006 isolate from Mexico. The reported sequence has 99 amino acid residues. The RPG (SEQ ID NO: 402) was isolated in silico and identified for diagnostic and therapeutic uses in, for example, an immunogenic compound and a therapeutic vaccine compound and as a predictive sequence for outbreaks of PRRSV. The total length of the RPG is 29 amino acids. The Replikin Count is 41.4. The Replikin sequences of SEQ ID NOS: 403-414 were identified in the RPG for diagnostic, therapeutic and predictive uses as described herein. SEQ ID NOS: 403-414 were identified in the amino-terminal of the sequence. No Replikin sequences were identified in the mid-molecule or carboxy-terminus.

[0448] The glycine, proline and glycine residues at positions 14 through 16 and the asparagine, arginine, lysine, arginine and asparagine residues at positions 21 through 25 were identified within the RPG (SEQ ID NO: 507) as non-conserved positions as compared to other reported nucleocapsid sequences such as Accession No. AA043261 above. Further, as compared to the RPG in Accession No. AA043261 above, the RPG identified in the 2006 Mexico isolate demonstrates a shortening of the RPG and noteworthy condensation of Replikin sequences within the shorter RPG. The result is a remarkable increase in Replikin Count between 2003 and 2006 corresponding to a severe outbreak of PRRSV in Mexico in 2006 with an increase in mortality rate.

[0449] Applicants likewise analyzed Accession Nos. AAM18565, AAP81809, ABL60920 having sequences of isolates from China in 2000, 2003, and 2006, respectively, to determine the Replikin Peak Gene of the isolates (SEQ ID NOS: 341, 342, and 343).

[0450] A Replikin Peak Gene was identified in Accession No. AAM18565 between residue 7 (lysine) and residue 66 (histidine). The inventors isolated the RPG (SEQ ID NO: 353) in silico and identified the sequence for diagnostic and therapeutic uses in, for example, an immunogenic compound and a therapeutic vaccine compound and as a predictive sequence for outbreaks of PRRSV. Thirteen Replikin sequences (SEQ ID NOS: 354-366) were identified in the RPG for diagnostic, therapeutic and predictive uses as described herein. SEQ ID NOS: 354-357 were identified in the amino-terminal portion of the sequence and SEQ ID NOS: 358-366 were identified in the mid-molecule portion of the sequence.

[0451] The Replikin Count of the whole sequence at Accession No. AAM18565 was 13 Replikin sequences within 123 amino acid residues or 10.6. The Replikin Count of the RPG area (SEQ ID NO: 353) was 13 Replikin sequences in 60 total amino acids for a Replikin Count of 21.7.

[0452] A Replikin Peak Gene was identified in Accession No. AAP81809 between residue 7 (lysine) and residue 66 (histidine). The inventors isolated the RPG (SEQ ID NO: 367) in silico and identified the sequence for diagnostic and therapeutic uses in, for example, an immunogenic compound and a therapeutic vaccine compound and as a predictive sequence for outbreaks of PRRSV. Thirteen Replikin sequences (SEQ ID NOS: 368-380) were identified in the RPG for diagnostic, therapeutic and predictive uses as described herein. SEQ ID NOS: 368-371 were identified in the amino-terminal portion of the sequence and SEQ ID NOS: 372-380 were identified in the mid-molecule portion of the sequence.

[0453] The Replikin Count of the whole sequence at Accession No. AAP81809 was 13 Replikin sequences within 123 amino acid residues or 10.6. The Replikin Count of the RPG area (SEQ ID NO: 367) was 13 Replikin sequences in 60 total amino acids for a Replikin Count of 21.7.

[0454] A Replikin Peak Gene was identified in Accession No. ABL60920 between residue 7 (lysine) and residue 66 (histidine). The inventors isolated the RPG (SEQ ID NO: 382) in silico and identified the sequence for diagnostic and therapeutic uses in, for example, an immunogenic compound and a therapeutic vaccine compound and as a predictive sequence for outbreaks of PRRSV. Ten Replikin sequences (SEQ ID NOS: 384-393) were identified in the RPG for diagnostic, therapeutic and predictive uses as described herein. SEQ ID NOS: 384-387 were identified in the amino-terminal portion of the sequence and SEQ ID NOS: 388-393 were identified in the mid-molecule portion of the sequence.

[0455] The Replikin Count of the whole sequence at Accession No. ABL60920 was 10 Replikin sequences within 123 amino acid residues or 8.1. The Replikin Count of the RPG area (SEQ ID NO: 367) was 10 Replikin sequences in 60 total amino acids for a Replikin Count of 16.7.

### Example 9

### Calculation of RPG in Porcine Circovirus

[0456] Applicants reviewed Replikin sequences publicly available at www.pubmed.com to determine the Replikin Peak Gene of available isolates of PCV. The inventors identified and compared a Replikin Peak Gene (RPG) of a protein fragment at Accession No. AAC59472 of a strain of PCV isolated from infected pigs in Manitoba, Canada in 1997 and a RPG of a putative truncated replicase protein at Accession No. ABP68657 of a strain of PCV isolated from infected pigs in China in 2007. The AAC59472 fragment was identified from nucleic acid encoding a predicted 1.8 kDa protein in open reading frame 11 of the isolate. The ABP68657 putative truncated replicase protein was identified in open reading frame 1 of the isolate.

[0457] In Accession No. AAC59472, the inventors identified an RPG (SEQ ID NO: 520) for diagnostic, therapeutic and predictive purposes as described herein. The RPG begins at residue 2 (lysine) and continues through residue 12 (lysine). Four Replikin sequences (SEQ ID NOS: 521-524) were identified for diagnostic, therapeutic and predictive uses as described in herein. The total length of the RPG is 11 amino acids. The Replikin Count is 36.4. The Replikin Count of the entire fragment is four Replikin sequences in fourteen amino acids or 28.6.

[0458] In Accession No. ABP68657, the inventors identified an RPG (SEQ ID NO: 525) for diagnostic, therapeutic and predictive purposes as described herein. Thirteen Replikin sequences (SEQ ID NOS: 526-538) were identified for diagnostic, therapeutic and predictive uses as described in herein. The total length of the RPG is 38 amino acids. The Replikin Count is 34.2. The Replikin Count of the entire putative truncated protein is 6.2.

[0459] The reported sequence at Accession No. AAC59472 has only 14 amino acid residues. Nevertheless, the high concentration of continuous, non-interrupted and overlapping Replikin sequences within the RPG (Replikin Count 36.4) is a predictor of virulence and provides sequences available as vaccines. In comparison, the RPG of the truncated replicase protein reported at Accession No. ABP68657 has 306 amino acid residues but the identified RPG has 13 Replikin sequences and a comparable Replikin Count of 34.2, which is likewise a predictor of virulence and provides sequences available as vaccines. Likewise, the high Replikin Count RPGs provide a target for production of immunogenic compounds for treatment and prevention of PCV.

[0460] A Replikin Peak Gene was identified in an isolate of PCV from 1997 publicly available at Accession No. AAC9885 between residues 4 (lysine) and 99 (histidine). The inventors isolated the RPG (SEQ ID NO: 421) in silico and identified the sequence for diagnostic and therapeutic uses in, for example, an immunogenic compound and a therapeutic vaccine compound and as a predictive sequence for outbreaks of PCV. Fourteen Replikin sequences (SEQ ID NOS: 422-435) were identified in the RPG for diagnostic, therapeutic and predictive uses as described herein. SEQ ID NOS: 422-435 were identified in the amino-terminal portion of the whole sequence disclosed at the accession number and SEQ ID NOS: 436-437 were identified in the mid-molecule portion of the sequence. No Replikin sequences were identified in the carboxy-portion of the sequence.

[0461] The Replikin Count of the whole sequence at Accession No. AAC9885 was 16 Replikin sequences within 312 amino acid residues or 5.1. The Replikin Count of the RPG area (SEQ ID NO: 421) was 14 Replikin sequences in 96 total amino acid residues for a Replikin Count of 14.6.

[0462] A Replikin Peak Gene was identified in an isolate of PCV from 2001 publicly available at Accession No. AAL01075 between residues 57 (histidine) and 94 (lysine). The inventors isolated the RPG (SEQ ID NO: 438) in silico and identified the sequence for diagnostic and therapeutic uses in, for example, an immunogenic compound and a therapeutic vaccine compound and as a predictive sequence for outbreaks of PCV. Twelve Replikin sequences (SEQ ID NOS: 439-450) were identified in the RPG for diagnostic, therapeutic and predictive uses as described herein. SEQ ID NOS: 439-445 were identified in the amino-terminal portion of the whole sequence disclosed at the accession number and SEQ ID NOS: 446-450 were identified in the mid-molecule portion of the sequence. No Replikin sequences were identified in the carboxy-portion of the sequence.

[0463] The Replikin Count of the whole sequence at Accession No. AAC9885 was 12 Replikin sequences within 314 amino acid residues or 3.8. The Replikin Count of the RPG area (SEQ ID NO: 438) was 12 Replikin sequences in 90 total amino acids for a Replikin Count of 13.3.

[0464] A Replikin Peak Gene was identified in an isolate of PCV from Canada in 2007 that is publicly available at Accession No. ABP68657. The RPG was identified between residues 57 (histidine) and 94 (lysine). The inventors isolated the RPG (SEQ ID NO: 462) in silico and identified the sequence for diagnostic and therapeutic uses in, for example, an immunogenic compound and a therapeutic vaccine compound and as a predictive sequence for outbreaks of PCV. Fourteen Replikin sequences (SEQ ID NOS: 462-476) were identified in the RPG for diagnostic, therapeutic and predictive uses as described herein. SEQ ID NOS: 462-476 were identified in the amino-terminal portion of the whole sequence disclosed at the accession number and SEQ ID NOS: 477-481 were identified in the mid-molecule portion of the sequence. No Replikin sequences were identified in the carboxy-portion of the sequence.

[0465] The Replikin Count of the whole sequence at Accession No. ABP68657 was 19 Replikin sequences within 306 amino acid residues or 6.2. The Replikin Count of the RPG area (SEQ ID NO: 462) was 14 Replikin sequences in 38 total amino acids for a Replikin Count of 36.8.

[0466] In Applicants' review of RPGs in publicly available PCV sequences, the inventors identified an RPG from Accession No. ABQ 10608 that contained each of the highly conserved Replikin sequences discussed in Section XI.G. above, namely, kngrsgpqphk (SEQ ID NO: 345); hlqgfanfvkkqtfnk (SEQ ID NO: 346) and kkqtfnkvkwylgarch (SEQ ID NO: 347).

[0467] The RPG was identified between residues 57 (histidine) and 94 (lysine). The inventors isolated the RPG (SEQ ID NO: 498) in silico and identified the sequence for diagnostic and therapeutic uses in, for example, an immunogenic compound and a therapeutic vaccine compound and as a predictive sequence for outbreaks of PCV. Six Replikin sequences (SEQ ID NOS: 487-492) were identified in the RPG for diagnostic, therapeutic and predictive uses as described herein. SEQ ID NOS: 486-492 were identified in the amino-terminal portion of the whole sequence disclosed at the accession number and SEQ ID NOS: 493-497 were identified in the mid-molecule portion of the sequence for therapeutic, diagnostic and predictive purposes. No Replikin sequences were identified in the carboxy-portion of the sequence.

[0468] The Replikin Count of the whole sequence at Accession No. ABQ10608 was 12 Replikin sequences within 314 amino acid residues or 3.8. The Replikin Count of the RPG area (SEQ ID NO: 498) was six Replikin sequences in 38 total amino acids or 15.8.

### Example 10

### Calculation of RPG in Tuberculosis Pathogen Mycobacterium

[0469] The inventors queried Accession No. AAS59518 at www.pubmed.com. Accession No. AAS59518 discloses an amino acid sequence from Mycobacterium mucogenicum strain CIP 105384. The inventors analyzed the amino acid sequence provided at AAS59518 (SEQ ID NO: 2901). Upon analysis of SEQ ID NO: 2901, the inventors observed a Replikin Peak Gene having continuous Replikin sequences that begin at residue 3 (histidine) and continue through residue 88 (histidine) (SEQ ID NO: 3649).

[0470] The inventors isolated the RPG (SEQ ID NO: 3659) in silico for diagnostic and therapeutic uses in, for example, an immunogenic compound and a therapeutic vaccine compound and as a predictive sequence for lethal outbreaks of tuberculosis. Twenty-four Replikin sequences (SEQ ID NOS: 2902-2925) were identified in the RPG of SEQ ID NO: 3659 for diagnostic, therapeutic and predictive uses as described herein. Replikin sequences SEQ ID NOS: 2902-2924 were identified in the amino-terminal of the sequence of SEQ ID NO: 2901, Replikin sequences SEQ ID NO: 2925 was identified in the mid-molecule of the sequence, and no Replikins were identified in the carboxy-terminal. All were isolated for diagnostic, therapeutic and predictive purposes.

[0471] The Replikin Count of the whole hemagglutinin sequence (SEQ ID NO: 2901) was 24 Replikin sequences in 147 total amino acids for a Replikin Count of 16.3. The Replikin Count of the RPG area (SEQ ID NO: 3659) was 24 Replikin sequences in 87 total amino acids for a Replikin Count of 27.6.

### Example 10

### Determination of Very High Replikin Count in WSSV Ribonucleotide Reductase from Accession No. AAL89390

[0472] Replikin concentration was determined for ribonucleotide reductase of a white spot syndrome virus (WSSV) isolate publicly available at Accession No. AAL89390. The amino acid sequence was translated from the total genome of a 2000 isolate of WSSV made publicly available at Accession No. NC 003225.1. The Replikin concentration in the protein was an unusually high 103.8 and the Replikin concentration of the Replikin Peak Gene of the protein was a yet higher 110.7.

[0473] The amino acid sequence of the protein publicly available at Accession No. AAL89390 is of particular interest because it demonstrates an overlapping of Replikin sequences that results in very high Replikin concentrations comparable to P. falciparum. The high concentrations of Replikin sequences provide a reservoir for transfer to influenza viruses.

[0474] In Accession No. AAL89390, SEQ ID NO: 668 is disclosed as a ribonucleotide reductase protein of white spot syndrome virus. Within SEQ ID NO: 668, the inventors identified a Replikin Peak Gene (SEQ ID NO: 669). The Replikin Peak Gene is observed to occupy most of the disclosed protein of SEQ ID NO: 668. The expansiveness of the Replikin Peak Gene across most of the amino acid sequence of the protein is highly unusual and creates a remarkably high Replikin concentration.

[0475] Replikin Count of SEQ ID NO: 668 was determined by dividing the number of Replikin sequences identified in the amino acid sequence of the protein, 497 Replikin sequences, by the total amino acid length of the protein, 479 amino acids, to arrive at 103.8 Replikin sequences per 100 amino acids. The Replikin Count of the RPG of SEQ ID NO: 669 was determined by dividing the number of Replikin sequences identified in the segment of the protein containing the highest concentration of continuous Replikin sequences, 497 Replikin sequences, by the total amino acid length Replikin Peak Gene, 449 amino acids, to arrive at 110.7.

[0476] Within the RPG of SEQ ID NO: 669, SEQ ID NOS: 670-1166 were identified as Replikin sequences. SEQ ID NOS: 669-866 were identified in the amino-terminus of the peptide, SEQ ID NOS: 867-1065 were identified in the middle portion, and SEQ ID NOS: 1066-1166 were identified in the carboxy-terminus.

[0477] SEQ ID NO: 669 was further observed to contain significant Replikin Scaffold sequences. SEQ ID NOS: 663-667 were identified as Replikin Scaffold repeats and were isolated for diagnostic, therapeutic and predictive uses.

[0478] Replikin Count was determined for a functionally undefined protein in the genome of a 2000 isolate WSSV at Accession No. NP 478030 (SEQ ID NO: 1167). The Replikin Count in the protein was again an unusually high 97.6 Replikin sequences per 100 amino acids determined by dividing the number of Replikin sequences identified in the amino acid sequence of the protein, 361 Replikin sequences, by the total amino acid length of the protein, 370 amino acids.

[0479] An RPG (SEQ ID NO: 1168) was identified within SEQ ID NO: 1167 between residues 22 (histidine) and 361 (lysine) and is available for diagnostic, therapeutic and predictive uses as described herein. Total Replikin sequences identified in the RPG were 361 with total amino acid residues of 361, for a Replikin Count in the RPG of 100. SEQ ID NOS: 1169-1330 were identified in the amino-terminus of the RPG. SEQ ID NOS: 1331-1465 were identified in the mid-molecule of the RPG and SEQ ID NOS: 1466-1529 were identified in the carboxy-terminus of the RPG. Each Replikin sequence is available for diagnostic, therapeutic and predictive purposes as described herein.

[0480] The amino acid sequence of Accession No. NP 478030 is of interest because, like the protein in Accession No. AAL89390, it demonstrates an overlapping of Replikin sequences that results in very high Replikin concentrations comparable to the highly-replicating P. falciparum of malaria. Overlapping Replikin sequences are exceptional targets for therapies such as immunogenic agents and vaccines and have excellent predictive capacities.

[0481] In 2006 and 2007 WSSV has been observed to be dormant in shrimp. This continued decline of WSSV into “quiescent” or “dormant” levels in 2006-2007 is demonstrated in mean Replikin Counts for viruses isolated during 2005-2007 that are very low as compared to years wherein the virus demonstrated greater virulence, such as 2001. The continued quiescence in WSSV in 2007 may be contrasted with an observed rising of Replikin concentration in taura syndrome virus Replikin during this period.

[0482] As may be seen from the analysis below, Accession Nos. ABS00973 and AAW88445 have low observed Replikin concentrations. ABS00973 contains a single Replikin sequence (SEQ ID NO: 1548) in the entire disclosed amino acid sequence of 240 residues at SEQ ID NO: 1547. The Replikin concentration of Accession No. ABS00973 is an inordinately low 0.5. AAW88445 contains a white spot syndrome virus protein of 261 amino acid residues (SEQ ID NO: 1530). An RPG of 34-105 was identified (SEQ ID NO: 1531). Within the RPG, eleven Replikin sequences were identified (SEQ ID NOS: 1532-1542). SEQ ID NOS: 1532-1542 were identified in the amino-terminus of SEQ ID NO: 1530 and SEQ ID NOS: 1543-1546 were identified in the carboxy-terminus of SEQ ID NO: 1530.

### Example 11

### Calculation of Replikin Count in Accession No. AAM73766 and AAY89096 in Taura Syndrome Virus

[0483] The inventors queried Accession No. AAM73766 at www.pubmed.com. Accession No. AAM73766 discloses an amino acid sequence from a 2005 isolate of TSV (SEQ ID NO: 3566). Applicants identified SEQ ID NOS: 3567-3569 as Replikin sequences in the amino-terminus of the sequence and SEQ ID NOS: 3570-3573 as Replikin sequences in the carboxy-terminus of the sequence. Each sequence was isolated in silico for diagnostic, therapeutic and predictive purposes as described herein. No Replikin sequence was identified in the mid-molecule. The Replikin Count of SEQ ID NO: 3566 was seven Replikin sequences in 1011 amino acid residues or 0.7.

[0484] The inventors queried Accession No. AAY89096 at www.pubmed.com. Accession No. AAY89096 discloses an amino acid sequence from a 2005 isolate of TSV (SEQ ID NO: 3574). Applicants identified SEQ ID NOS: 3575-3587 in the amino-terminus of the sequence. SEQ ID NOS: 3588-3634 were identified as Replikin sequences in the mid-molecule. And SEQ ID NOS: 3635-3657 were identified as Replikin sequences in the carboxy-terminus of the sequence. Each sequence was isolated in silico for diagnostic, therapeutic and predictive purposes as described herein. Replikin Count of SEQ ID NO: 3574 was 83 Replikin sequences in 2107 amino acid residues or 3.9.

### Example 12

### Analysis of pB1-F2 Gene Area for All Publicly Available Influenza A Strains 2002-2007

[0485] The inventors queried www.pubmed.com with the software program FluForecast® available from Replikins LLC of Boston, Mass. to analyze all amino acid sequences from the pB1-F2 gene area of all isolates of Influenza A available between 2002 and 2007. Table 20 provides the results of the query. The data for mean Replikin count for 2005, 2006 and 2007 suggest that the current epidemic is not over. For example, the SARS data in FIG. 9 demonstrates that prior to a decline in epidemic infections, a decrease in Replikin Count is expected. Such a decline is not seen in the data in Table 20.

TABLE 20
PB1-F2 Influenza A 2002-2007

| | | | Mean | | |
|---|---|---|---|---|---|
| | | No. of | Replikin | | |
| | | Isolates | Count | | |
| | | per | per | | |
| Year | PubMed Accession Number-Replikin Count | year | year | S.D. | Significance |
| 2002 | ABD59827 15 ABD59825 15 ABD59823 12 | 3 | 1.8 | 0.2 | low p < .05, prev |
| | | | | | p < .001 |
| 2003 | ABD59830 12 ABK40004 12 AAZ79547 12 AAZ79504 15 | 4 | 1.7 | 0.2 | low p < .005, |
| | | | | | prev p < .30 |
| 2004 | ABD59835 12 ABD59833 12 | 2 | 1.6 | 0.0 | prev p < .30 |
| 2005 | ABI36231 16 ABI36226 16 ABI36221 16 ABI36217 16 | 10 | 9.6 | 8.1 | low p < .02 |
| | ABI36215 15 ABI36210 15 ABI36032 14 ABI36021 14 | | | | |
| | ABI36010 15 ABI36001 14 | | | | |
| 2006 | BAF37385 16 BAE97585 16 ABL31778 16 ABL31775 21 | 48 | 16.6 | 4.7 | low p < .001, |
| | ABL31764 21 ABL31742 16 ABI49394 16 ABL07028 21 | | | | prev p < .01 |
| | ABL07017 16 ABL07006 16 ABI49405 16 ABI36473 16 | | | | |
| | ABI36462 16 ABI36453 16 ABI36442 16 ABI36431 16 | | | | |
| | ABI36421 16 ABI36409 16 ABI36398 16 ABI36387 16 | | | | |
| | ABI36376 16 ABI36365 16 ABI36354 15 ABI36343 15 | | | | |
| | ABI36332 15 ABI36321 15 ABI36310 16 ABI36304 16 | | | | |
| | ABI36293 16 ABI36284 16 ABI36272 16 ABI36269 16 | | | | |
| | ABI36266 16 ABI36262 16 ABI36258 16 ABI36253 16 | | | | |
| | ABI36250 16 ABI36245 14 ABI36242 14 ABI36237 14 | | | | |
| | ABI36233 14 ABI36206 16 ABI36196 16 ABI36185 16 | | | | |
| | ABI36175 16 ABI36164 16 ABI36153 16 ABI36142 16 | | | | |
| 2007 | ABM90520 16 ABM90542 16 ABM90531 16 ABM90509 16 | 11 | 17.8 | 0.0 | low p < .001 |
| | ABM90498 16 ABM90487 16 ABM90476 16 ABM90465 16 | | | | |
| | ABM90454 16 ABM90443 16 ABM90432 16 | | | | |

### Example 13

### H1N1 hemagglutinin (whole hemagglutinin) Replikin Count by Year

[0486] The inventors queried www.pubmed.com with the software program FluForecast® available from Replikins LLC of Boston, Mass. to analyze all amino acid sequences of all isolates of H1N1 Influenza A available between 1917 and 2007. Table 21 provides the results of the query.

TABLE 21
H1N1 Influenza A 1918-2007

| | | | Mean | | |
|---|---|---|---|---|---|
| | | No. of | Replikin | | |
| | | Isolates | Count | | |
| | | per | per | | |
| Year | PubMed Accession Number-Replikin Count | year | year | S.D. | Significance |
| 1918 | AAO65768 13 | 1 | 7.0 | 0.0 | |
| 1919 | AAO65769 13 | 1 | 7.0 | 0.0 | |
| 1930 | Q9WCD9 27 AAD25303 27 AAB52905 16 CAA40729 16 | 5 | 4.4 | 0.7 | low p < .001, |
| | P05779 3 | | | | prev p < .001 |
| 1931 | AAA19935 16 ABD79255 27 | 2 | 4.7 | 0.1 | low p < .01, |
| | | | | | prev p < .30 |
| 1933 | ABD77796 31 ABF47955 31 P03454 31 AAA43209 31 P05780 | 6 | 4.4 | 1.7 | low p < .01, |
| | 2 P03470 11 | | | | prev p > .50 |
| 1934 | AAA58799 21 ABP64731 38 ABP64721 35 AAA43661 7 | 14 | 6.1 | 1.3 | low p < .02, |
| | ABO21709 38 ABD77675 38 P03452 38 AAA43194 21 | | | | prev p < .04 |
| | AAM75158 38 YP_163736 38 YP_163735 38 NP_040980 38 | | | | |
| | P03468 11 P06821 6 | | | | |
| 1935 | ABD62781 38 ABW71481 22 ABO38384 41 ABN59412 38 | 4 | 6.1 | 1.5 | low p < .30, |
| | | | | | prev p > .50 |
| 1936 | ABO38351 39 | 1 | 6.9 | 0.0 | prev p < .30 |
| 1937 | AAA67181 14 | 1 | 4.3 | 0.0 | |
| 1938 | AAA67182 18 | 1 | 5.5 | 0.0 | |
| 1939 | AAA67183 4 BAA00718 19 | 2 | 2.3 | 1.5 | low p < .10, |
| | | | | | prev p < .20 |
| 1940 | ABI20826 38 | 1 | 6.7 | 0.0 | prev p < .10 |
| 1941 | | | | | |
| 1942 | ABD62843 28 ABW38010 28 | 2 | 4.9 | 0.0 | |
| 1943 | AAM76687 14 ABD79101 40 AAM76691 9 AAM76688 9 | 7 | 4.1 | 1.7 | low p < .002, |
| | AAM76686 9 ABO38373 28 ABO38054 28 | | | | prev p < .20 |
| 1945 | ABP49327 28 | 1 | 4.9 | 0.0 | prev p < .20 |
| 1946 | ABD79112 38 | 1 | 6.7 | 0.0 | |
| 1947 | AAM76690 10 ABD77807 36 AAM76689 12 AAA67338 36 | 28 | 2.7 | 1.5 | low p < .001, |
| | AAC53844 36 BAA96109 14 AAA67339 8 AAA67340 2 | | | | prev p < .001 |
| | AAA67341 2 AAA67336 3 AAA67337 3 AAB39916 3 | | | | |
| | AAB39915 3 CAA67497 18 CAA67496 18 CAA67499 11 | | | | |
| | CAA67498 11 CAA67500 26 P26070 8 Q8JSD9 10 Q82571 11 | | | | |
| | Q82573 18 P03506 2 Q82570 26 CAB50889 2 CAB50888 2 | | | | |
| | CAB50887 8 CAB50886 26 | | | | |
| 1948 | BAA96110 14 ABN59401 37 | 2 | 5.3 | 1.7 | low p < .40, |
| | | | | | prev p < .05 |
| 1949 | ABN59434 37 | 1 | 6.5 | 0.0 | prev p < .40 |
| 1950 | ABD61735 29 ABP49316 41 P10921 3 | 3 | 5.2 | 2.1 | low p < .20, |
| | | | | | prev p < .30 |
| 1951 | BAA96112 16 BAA96111 10 ABR15808 36 ABQ44471 36 | 6 | 5.6 | 1.5 | low p < .05, |
| | ABQ01311 38 ABP49481 36 | | | | prev p > .50 |
| 1952 | BAA96113 13 | 1 | 3.8 | 0.0 | prev p < .02 |
| 1954 | ABD60966 34 BAA96114 4 ABO52280 34 | 3 | 4.4 | 2.8 | low p < .20, |
| | | | | | prev p > .50 |
| 1955 | BAA96115 6 | 1 | 1.7 | 0.0 | prev p < .20 |
| 1956 | BAA96116 9 AAF99713 18 AAF99712 16 | 3 | 2.9 | 0.3 | low p < .001, |
| | | | | | prev p < .02 |
| 1957 | ABD15258 24 AAG22555 3 BAA96117 8 ABV82573 36 | 4 | 4.3 | 1.6 | low p < .04, |
| | | | | | prev p < .10 |
| 1961 | Q9WCD8 36 AAD25302 36 | 2 | 6.4 | 0.0 | prev p < .05 |
| 1963 | CAA40730 18 | 1 | 5.0 | 0.0 | |
| 1966 | ABV82595 34 | 1 | 6.0 | 0.0 | |
| 1967 | ABV82584 32 | 1 | 5.7 | 0.0 | |
| 1970 | ABR28724 36 | 1 | 6.4 | 0.0 | |
| 1971 | ABR28702 36 | 1 | 6.4 | 0.0 | |
| 1972 | ABF21276 48 ABF21278 48 ABF21277 48 ABF21274 48 | 5 | 8.2 | 0.0 | |
| | ABF21272 48 | | | | |
| 1974 | CAA40728 18 | 1 | 5.0 | 0.0 | |
| 1975 | ABU80188 41 ABR28680 39 ABR28603 39 | 3 | 7.0 | 0.2 | low p > .50, |
| | | | | | prev p < .002 |
| 1976 | ABS18465 32 AAF99717 24 AAF99716 30 AAF99715 27 | 28 | 6.0 | 1.8 | low p < .005, |
| | AAF99714 30 ABQ45533 41 ABW36366 42 ABW36322 41 | | | | prev p < .005 |
| | ABV45838 43 ABR28625 41 ABR28614 43 ABR15819 39 | | | | |
| | ABQ45458 42 ABQ45447 41 ABQ45436 41 ABQ45425 42 | | | | |
| | ABQ45414 42 ABQ44394 40 P26562 31 P03455 40 AAB52910 | | | | |
| | 16 AAD25304 31 AAB50962 18 AAB50961 16 AAB39851 40 | | | | |
| | BAA01280 31 Q76WJ1 6 Q9IGQ0 4 | | | | |
| 1977 | ABD95350 37 ABD60944 37 ABD60933 37 ABW71492 38 | 42 | 6.4 | 1.2 | low p < .005, |
| | ABU80410 41 ABW36410 38 ABW36399 38 ABW36388 38 | | | | prev p < .20 |
| | ABW36377 38 ABV29524 41 ABU80287 38 ABU80254 41 | | | | |
| | ABU80243 41 ABU80232 41 ABU80221 41 ABU80210 38 | | | | |
| | ABU80199 41 ABD95712 37 ABS49921 41 ABR28647 41 | | | | |
| | ABR28581 41 ABR28570 41 ABR28559 41 ABR28548 41 | | | | |
| | ABR28537 43 ABR15874 41 ABR15863 41 ABR15852 41 | | | | |
| | ABR15841 41 ABR15830 41 ABO44134 37 ABB19667 31 | | | | |
| | ABB19529 31 ABB19518 31 P03453 37 AAD25308 30 | | | | |
| | AAA43240 16 AAA43206 27 AAB52908 15 BAF03627 29 | | | | |
| | P35938 3 P03469 8 | | | | |
| 1978 | ABW86585 41 ABW86574 41 ABW71503 41 ABU80265 39 | 21 | 6.4 | 0.8 | low p < .005, |
| | ABR28691 39 ABP49448 37 ABP49338 37 ABO38065 37 | | | | prev p > .50 |
| | ABO32992 37 ABO32981 39 ABN59423 37 ABK79948 37 | | | | |
| | ABG26813 37 ABF47737 37 ABF47726 37 ABF47715 37 | | | | |
| | ABF47704 37 ABF47693 37 AAA74287 16 AAA65552 16 | | | | |
| | AAA65548 16 | | | | |
| 1979 | ABS18464 32 AAA43172 37 ABW36311 37 ABR28636 45 | 11 | 5.8 | 1.6 | low p < .02, |
| | ABQ01322 38 ABN50756 37 ABB19551 30 ABB19540 31 | | | | prev p < .20 |
| | P18875 37 CAA86563 15 P31348 8 | | | | |
| 1980 | AAA16879 31 AAA16880 29 ABS18466 41 AAB50965 16 | 19 | 6.5 | 1.0 | low p < .05, |
| | ABU80276 44 ABS49954 44 ABR28757 44 ABR28746 44 | | | | prev p < .20 |
| | ABR28735 44 ABR28713 39 ABO38362 38 ABO33006 37 | | | | |
| | ABI84478 32 ABF47748 38 Q9WCE3 32 AAB52909 17 | | | | |
| | AAD25309 35 AAD25307 32 CAA40731 20 | | | | |
| 1981 | AAB50964 16 BAA02766 5 AAZ15840 15 AAZ15839 15 | 33 | 5.9 | 1.0 | low p < .001, |
| | ABW36355 41 ABW36344 41 ABW36333 41 ABS49932 41 | | | | prev p < .05 |
| | ABR28669 41 ABR28658 41 ABO52258 38 ABI84617 31 | | | | |
| | ABB21772 31 BAA02767 5 BAA02765 7 Q9WCE1 31 | | | | |
| | AAB52906 22 AAD25301 44 AAD25305 31 CAA86562 14 | | | | |
| | CAA82950 38 AAK51352 20 AAK51351 20 AAK51350 20 | | | | |
| | AAK51349 20 AAK51348 20 AAK51347 20 AAK51346 20 | | | | |
| | AAK51345 20 AAK51344 20 AAK51343 20 AAK51342 20 | | | | |
| | AAK51341 20 | | | | |
| 1982 | P26142 3 ABD95339 38 ABD77818 38 AAA16905 3 | 8 | 5.2 | 2.2 | low p < .05, |
| | ABO52797 42 P10757 44 AAA65553 17 CAC86623 11 | | | | prev p < .30 |
| 1983 | ABG66977 17 ABG66976 17 ABG66975 20 ABG66974 20 | 56 | 6.9 | 0.9 | low p > .50, |
| | ABG66973 20 ABO38340 41 ABO37988 41 ABO33025 42 | | | | prev p < .02 |
| | ABN50917 41 ABN50900 38 ABM66886 41 ABM66908 41 | | | | |
| | ABM66897 41 ABM22235 41 ABM22224 41 ABM22213 41 | | | | |
| | ABM22202 41 ABM22191 41 ABM22180 41 ABM22169 41 | | | | |
| | ABM22158 41 ABL67264 41 ABL67253 41 ABK80047 41 | | | | |
| | ABK80036 41 ABK80025 41 ABK40601 41 ABK40590 41 | | | | |
| | ABK40579 41 ABK40568 41 ABK40557 41 ABK40546 41 | | | | |
| | ABK40534 41 ABK40510 41 ABI92302 38 ABI30378 41 | | | | |
| | ABI20859 41 ABG88344 38 ABG88333 38 ABF47825 41 | | | | |
| | ABF47770 41 ABG79952 41 ABF47847 41 ABF47836 41 | | | | |
| | ABF47759 41 ABF47792 41 ABG26835 41 ABG26824 41 | | | | |
| | ABF47814 41 ABF47803 41 ABF47781 41 BAF63173 20 | | | | |
| | ABW91185 41 AAD25311 34 CAA35094 39 P11485 8 | | | | |
| 1984 | AAA43171 36 AAZ15838 15 ABP49349 39 ABO38406 42 | 9 | 6.0 | 1.0 | low p < .02, |
| | P18876 36 AAB27052 21 AAA65557 21 AAA65556 20 | | | | prev p < .01 |
| | AAA65555 20 | | | | |
| 1985 | CAA91080 27 AAB50966 13 ABW86596 41 ABR29615 41 | 10 | 5.3 | 1.7 | low p < .01, |
| | ABR29605 41 Q9WCE8 32 AAB52907 15 AAD25306 30 | | | | prev p < .30 |
| | AAD25312 32 P31349 8 | | | | |
| 1986 | AAA43236 17 BAA00309 18 BAA00308 17 ABP49360 34 | 13 | 5.5 | 0.7 | low p < .001, |
| | ABO44123 37 ABO38395 37 ABM22246 34 AAC57166 36 | | | | prev p > .50 |
| | BAF63172 16 P12590 17 AAA65547 17 BAA00722 17 | | | | |
| | CAA35097 17 | | | | |
| 1987 | BAA96118 17 AAZ15842 16 ABU80420 41 ABS50111 41 | 17 | 5.9 | 1.0 | low p < .001, |
| | ABR29575 41 ABV29590 33 ABS49943 33 ABQ44416 34 | | | | prev p < .20 |
| | ABG88212 29 ABN50940 34 ABN50928 34 AAD25310 33 | | | | |
| | AAA43680 17 AAA65550 17 AAA65549 17 CAA35095 44 | | | | |
| | P05778 4 | | | | |
| 1988 | CAA91081 38 AAA43238 17 AAA43233 17 AAA43231 17 | 23 | 5.4 | 1.2 | low p < .001, |
| | AAA43170 16 AAA43169 17 AAA43166 17 AAA43161 18 | | | | prev p < .20 |
| | AAA43157 14 ABU80400 40 ABS50121 40 ABR29595 42 | | | | |
| | ABR29585 42 ABB19607 30 P26140 39 AAB52904 18 | | | | |
| | CAA42444 14 ABF71860 39 AAA74300 14 AAA74299 17 | | | | |
| | AAA74298 14 AAA74285 14 AAA65551 17 | | | | |
| 1989 | AAA43168 18 AAA43158 14 AAA58800 21 AAA58801 21 | 15 | 4.0 | 2.3 | low p < .001, |
| | BAA06719 14 BAA96119 14 AAZ15841 20 BAA02768 31 | | | | prev p < .02 |
| | BAA02769 33 BAF63171 13 AAA74286 14 ABG57284 2 | | | | |
| | ABG57283 2 ABG57282 2 ABG57281 2 | | | | |
| 1990 | AAA43235 14 AAA43234 14 AAA43232 14 AAA43190 14 | 23 | 3.9 | 1.2 | low p < .001, |
| | AAA43173 14 AAA43153 14 AAA91616 27 AAZ15844 16 | | | | prev p > .50 |
| | AAZ15843 8 ABG88201 34 AAB57740 16 AAA16778 14 | | | | |
| | AAA16779 14 AAA16815 14 AAA16814 14 AAA16813 14 | | | | |
| | AAA16812 13 AAA16811 14 AAA16810 14 AAA16809 14 | | | | |
| | AAA16808 15 ABG66980 2 ABG66979 2 | | | | |
| 1991 | AAA43225 14 CAA91082 38 AAP34322 36 AAA43167 14 | 36 | 4.8 | 1.8 | low p < .001, |
| | AAA43283 42 BAA96120 14 ABW71521 42 ABR29565 42 | | | | prev p < .02 |
| | ABQ10099 16 ABD60955 33 AAA19934 37 S69887 26 S69888 | | | | |
| | 36 S69889 42 AAB50963 42 CAA91083 34 CAA86560 39 | | | | |
| | CAA86567 17 AAA43142 14 AAA74297 14 AAA74296 14 | | | | |
| | AAA74295 14 AAA74294 14 AAA74293 14 AAA74292 17 | | | | |
| | AAA74291 14 AAA74290 14 AAA74289 14 AAA74288 14 | | | | |
| | AAA65546 14 AAA65545 14 AAA65544 14 CAD29945 19 | | | | |
| | ABG66981 2 ABG66978 2 ABE73717 2 | | | | |
| 1992 | AAB29091 41 BAA05874 14 BAA96121 14 ABB19618 30 | 11 | 5.2 | 2.0 | low p < .01, |
| | AAU09400 12 AAC57167 38 HMIV17 39 CAA86561 39 | | | | prev p > .50 |
| | AAC14275 14 AAA51481 5 AAA72339 41 | | | | |
| 1993 | ABM21960 34 ABI92181 30 AAC57169 35 AAC57168 36 | 8 | 5.9 | 1.0 | low p < .01, |
| | ABO52170 39 AAB50960 31 AAB50958 17 AAB50957 17 | | | | prev p < .30 |
| 1994 | ABS70427 30 AAB03292 42 AAB03291 42 AAB50959 31 | 5 | 6.3 | 1.5 | low p < .30, |
| | CAD29938 14 | | | | prev p > .50 |
| 1995 | AAK70450 37 AAK70449 37 AAP34325 38 AAP34323 20 | 47 | 6.1 | 1.7 | low p < .001, |
| | BAC82887 19 BAC82881 19 BAA96122 19 AAZ17358 16 | | | | prev p > .50 |
| | ABQ10100 19 ABP51995 1 ABG88322 36 ABG26791 37 | | | | |
| | ABF47638 36 ABJ53438 37 ABI92313 40 ABI30367 36 | | | | |
| | ABI20870 31 ABI20837 36 ABG88311 36 ABG88300 36 | | | | |
| | ABF47627 37 ABG47840 36 ABG26780 36 ABF47605 37 | | | | |
| | ABE26991 36 ABE12032 37 ABE11942 36 ABE11922 36 | | | | |
| | ABE11900 36 ABE11889 36 ABE11878 36 ABE11867 37 | | | | |
| | AAL60449 36 AAL60444 36 AAL60443 36 AAK67336 17 | | | | |
| | AAK67335 17 AAK67332 17 AAK67331 17 AAK67330 17 | | | | |
| | ABS70438 30 CAC86625 18 CAC86619 14 CAC86617 18 | | | | |
| | CAD29944 19 CAD29937 1 CAD29936 14 | | | | |
| 1996 | BAC82896 19 BAC82893 19 BAC82884 19 BAA96124 19 | 87 | 7.1 | 1.9 | low p < .40, |
| | BAA96123 19 AAK73345 16 AAK73344 16 AAK73343 16 | | | | prev p < .002 |
| | AAK73342 16 AAK73341 16 AAK73340 16 AAK73339 16 | | | | |
| | AAK73338 16 AAK73337 16 AAK73336 16 AAK73335 16 | | | | |
| | AAK73334 16 AAK73333 16 AAK73332 16 AAK73331 16 | | | | |
| | AAK73330 16 AAK73329 16 AAK73328 16 AAK73327 16 | | | | |
| | AAK73326 12 AAK73325 16 AAK73324 16 AAK73323 16 | | | | |
| | AAK73322 16 AAK73321 16 AAK73320 16 ABO52225 37 | | | | |
| | ABO38010 37 ABN51066 39 ABN50973 37 ABN50962 37 | | | | |
| | ABN50951 36 ABF47649 36 ABM22290 36 ABM22279 37 | | | | |
| | ABM22268 36 ABM22257 36 ABB19571 30 ABJ53504 31 | | | | |
| | ABJ53493 31 ABI95283 31 ABI95272 31 ABI95261 31 | | | | |
| | ABI95250 31 ABI93028 31 ABI21574 31 ABI21563 31 | | | | |
| | ABI21552 31 ABI21541 31 ABI21530 29 ABI21519 31 | | | | |
| | ABI20848 39 ABG47829 36 ABF47660 37 AAK67328 17 | | | | |
| | AAK67327 17 AAK67326 17 AAK67325 17 AAK67324 17 | | | | |
| | AAK67323 22 AAK67322 17 AAP60039 37 AAP60038 39 | | | | |
| | AAP60037 42 AAP60036 37 AAF06947 16 AAF06946 13 | | | | |
| | AAF06945 13 CAC86611 17 AAB81463 23 AAB81462 19 | | | | |
| | AAB81461 19 AAB81460 19 AAB81459 23 AAB81458 19 | | | | |
| | AAB81457 19 AAB81456 19 CAC86616 38 BAF03629 30 | | | | |
| | ABD59847 36 CAD29943 18 CAD29933 14 | | | | |
| 1997 | AAD17229 29 BAA96125 14 ABG26246 19 ABG26245 19 | 28 | 5.7 | 2.0 | low p < .001, |
| | ABG26244 19 ABG26243 19 ABG26242 19 AAQ10369 19 | | | | prev p < .001 |
| | AAQ10368 16 AAQ10367 19 AAK67337 12 AAF87281 48 | | | | |
| | AAF87280 48 AAF87279 42 AAF87278 42 AAF87277 42 | | | | |
| | AAF87276 42 AAF87275 39 AAF87274 40 AAP79975 1 | | | | |
| | AAP79973 1 CAC86608 42 CAC86606 33 ABD59848 34 | | | | |
| | CAD29934 14 CAD29932 14 CAD29928 14 CAC86615 17 | | | | |
| 1998 | AAK70464 22 AAK70459 7 AAK70458 18 AAK70457 31 | 38 | 5.1 | 1.2 | low p < .001, |
| | AAK70456 31 AAK70455 14 AAK70454 29 AAK70453 29 | | | | prev p < .10 |
| | AAK70452 29 AAK70451 31 AAD17218 21 BAC82898 14 | | | | |
| | BAC82877 14 BAC82871 17 BAA96131 14 BAA96126 14 | | | | |
| | AAD17219 21 ABQ10144 13 ABQ10143 18 ABQ10087 16 | | | | |
| | ABB19574 31 AAK67319 12 AAF87284 45 AAF87283 41 | | | | |
| | AAF87282 42 AAT00438 23 CAB42465 30 AAT65329 30 | | | | |
| | AAO88265 20 CAC86609 6 CAC86624 28 CAD29935 17 | | | | |
| | CAD29931 14 CAD29929 13 CAD29927 14 CAD29922 14 | | | | |
| | CAC86335 17 CAC86620 32 | | | | |
| 1999 | AAP34324 31 ABV25643 49 ABV25640 49 ABV25638 49 | 65 | 5.3 | 2.0 | low p < .001, |
| | ABV25637 49 ABV25636 49 ABV25635 49 ABV25634 49 | | | | prev p < .40 |
| | ABQ10137 15 ABL67055 30 ABL67066 30 ABJ53427 30 | | | | |
| | ABG88256 30 BAC82894 17 BAC82892 14 BAC82885 9 | | | | |
| | BAC82883 14 BAC82876 17 BAC82875 14 BAC82873 20 | | | | |
| | BAC82872 14 BAA96128 14 BAA96127 14 ABO21723 19 | | | | |
| | ABK40006 31 ABJ16609 31 AAQ10385 19 AAQ10380 19 | | | | |
| | AAQ10373 19 AAQ10372 19 AAK67343 12 AAK67342 12 | | | | |
| | AAK67341 12 AAK67340 12 AAK67339 12 AAK67334 17 | | | | |
| | AAK67333 12 AAK67329 12 BAF63169 13 BAF63168 13 | | | | |
| | BAF63167 13 BAF63166 13 AAF80098 14 AAF80099 14 | | | | |
| | CAC86337 51 CAC86336 19 CAC86610 51 CAC86622 31 | | | | |
| | CAC86605 19 ABD59849 28 CAD29942 19 CAD29921 14 | | | | |
| | CAD29917 14 CAD29916 14 ABV25653 9 ABV25650 9 | | | | |
| | ABV25648 9 ABV25647 9 ABV25646 9 ABV25645 9 | | | | |
| | ABV25644 9 BAF63165 13 CAC86334 17 CAC86626 14 | | | | |
| | CAC86621 23 | | | | |
| 2000 | ABC66246 1 ABC66232 13 AAY42122 15 AAY42121 15 | 147 | 5.0 | 1.6 | low p < .001, |
| | AAY42120 15 AAY42119 15 AAY42118 15 AAY42117 15 | | | | prev p < .10 |
| | AAY42116 15 AAY42115 15 AAY42114 15 BAC82897 19 | | | | |
| | BAC82895 14 BAC82891 13 BAC82890 14 BAC82889 14 | | | | |
| | BAC82888 13 BAC82886 14 BAC82882 13 BAC82880 14 | | | | |
| | BAC82879 14 BAC82878 14 BAC82874 19 BAC82870 14 | | | | |
| | BAC82865 14 AAN83988 20 BAA96130 19 BAA96129 14 | | | | |
| | AAK40315 14 AAK40318 14 AAK40316 14 AAK40317 14 | | | | |
| | AAK40314 14 AAK40313 14 ABV45849 31 ABU80309 31 | | | | |
| | ABU80298 32 ABS49987 31 ABS49976 31 ABR28801 31 | | | | |
| | ABR28779 31 ABR28768 31 ABR14657 1 ABR14641 1 | | | | |
| | ABR14640 14 ABR14639 14 ABR15918 31 ABR15907 31 | | | | |
| | ABR15896 18 ABR15885 31 ABQ10097 20 ABQ10095 13 | | | | |
| | ABP49382 37 ABP49305 31 ABP49217 31 ABO44046 31 | | | | |
| | ABO21725 19 ABO21724 21 ABO21716 19 ABM22026 39 | | | | |
| | ABL67209 37 ABL67187 37 ABK79970 37 ABK40050 37 | | | | |
| | ABK40039 37 ABK40028 37 AAX56530 41 ABJ53515 37 | | | | |
| | ABJ53449 31 ABJ16730 37 ABJ16719 37 ABJ16642 37 | | | | |
| | ABJ09327 18 ABI95294 18 ABI95217 31 ABG88553 31 | | | | |
| | ABG88542 31 ABG80183 31 ABG80172 31 ABG67477 31 | | | | |
| | ABG48049 31 ABG37362 31 ABF47891 31 ABF47880 31 | | | | |
| | ABF47869 31 ABG72870 1 ABG72869 1 ABG47818 31 | | | | |
| | ABG47807 31 ABE11668 18 ABE11657 31 ABD95031 18 | | | | |
| | ABD95020 31 ABD95009 31 ABD94998 31 ABD94987 31 | | | | |
| | ABD94976 18 ABD94965 31 ABD94756 31 ABD78038 31 | | | | |
| | ABD78027 31 ABD78016 31 ABD78005 31 ABD77994 31 | | | | |
| | ABD77983 31 ABD77972 31 ABD77961 31 ABD77950 31 | | | | |
| | ABD77939 31 ABD77928 33 ABD77917 31 ABD77730 31 | | | | |
| | ABD77719 31 ABD77708 31 ABD63063 31 ABD61540 31 | | | | |
| | ABD61518 31 ABD60900 31 ABD60889 31 ABD60878 31 | | | | |
| | ABD60867 31 ABD60856 31 ABA08497 18 ABA08486 18 | | | | |
| | AAQ10391 2 AAK67344 12 AAK67338 12 AAK67321 12 | | | | |
| | AAK67320 12 AAL15459 27 CAC86333 28 CAC86607 28 | | | | |
| | CAC86612 28 CAD29941 19 CAD29940 19 CAD29939 24 | | | | |
| | CAD29930 1 CAD29926 1 CAD29924 1 CAD29920 16 | | | | |
| | CAD29919 14 CAD29899 14 CAD57622 6 CAC86618 31 | | | | |
| | CAC86614 17 CAC86613 17 CAC18525 12 | | | | |
| 2001 | AAP79964 12 ABC66233 14 BAC82869 1 BAC82868 1 | 193 | 3.2 | 1.6 | low p < .001, |
| | BAC82867 1 BAC82866 1 BAC82864 1 BAC82863 1 | | | | prev p < .001 |
| | BAC82862 14 BAC82861 1 BAC82860 13 BAC82859 14 | | | | |
| | BAC82858 14 BAC82857 14 BAC82846 1 BAC82843 1 | | | | |
| | ABI55088 1 AAZ17359 25 AAY56898 32 ABR28845 18 | | | | |
| | ABR28834 18 ABR14668 14 ABR14667 14 ABR14666 14 | | | | |
| | ABR14665 14 ABR14664 14 ABR14663 13 ABR14662 14 | | | | |
| | ABR14661 14 ABR14660 14 ABR14659 14 ABR14658 14 | | | | |
| | ABR14656 1 ABR14655 1 ABR14654 1 ABR14653 1 | | | | |
| | ABR14652 1 ABR14651 1 ABR14650 1 ABR14649 14 | | | | |
| | ABR14648 14 ABR14647 14 ABR14646 14 ABR14645 14 | | | | |
| | ABR14644 14 ABR14643 14 ABR14642 14 BAF63035 13 | | | | |
| | BAF63032 13 ABQ10092 1 ABQ10091 1 ABQ10090 1 | | | | |
| | ABQ10089 14 ABO38329 18 ABO38318 18 ABO38043 18 | | | | |
| | ABO38032 31 ABO38021 31 ABO32959 18 ABO32948 18 | | | | |
| | ABN51143 18 ABN51077 18 ABM66864 18 ABJ09151 19 | | | | |
| | ABG67491 18 ABG37395 18 ABG37384 18 ABG26945 18 | | | | |
| | ABF82940 18 ABF82929 18 ABF82918 18 ABF82907 18 | | | | |
| | ABF82896 18 ABF82885 18 ABF82874 18 ABF82863 18 | | | | |
| | ABF82852 18 ABF82841 18 ABF82830 18 ABF82819 31 | | | | |
| | ABG72867 1 ABG72866 1 ABF47671 18 ABF47572 18 | | | | |
| | ABF47561 29 ABG37120 18 ABF82684 18 ABF82673 18 | | | | |
| | ABF82662 18 ABF47583 18 ABE12248 18 ABE11856 18 | | | | |
| | ABE11845 18 ABE11834 18 ABE11823 18 ABE11812 18 | | | | |
| | ABE11734 18 ABE11723 18 ABE11712 18 ABE11701 18 | | | | |
| | ABE11690 18 ABE11679 26 ABD95328 18 ABD95317 18 | | | | |
| | ABD95306 18 ABD95295 18 ABD95284 18 ABD95273 18 | | | | |
| | ABD95262 31 ABD95251 18 ABD95240 18 ABD95229 18 | | | | |
| | ABD95218 18 ABD95207 31 ABD95196 18 ABD95185 18 | | | | |
| | ABD95174 18 ABD95163 18 ABD95152 18 ABD95141 18 | | | | |
| | ABD95130 18 ABD95119 18 ABD95108 18 ABD95097 18 | | | | |
| | ABD95086 18 ABD95075 18 ABD95064 18 ABD95053 18 | | | | |
| | ABD95042 18 ABD94811 18 ABD94800 18 ABD94789 18 | | | | |
| | ABD94778 18 ABD78093 18 ABD78082 18 ABD78071 18 | | | | |
| | ABD78060 18 ABD62061 31 ABD60911 31 ABC86237 36 | | | | |
| | ABC40533 18 ABB02814 18 ABA87231 18 ABA87091 18 | | | | |
| | ABC02277 18 ABB82194 18 ABB80045 18 ABB79990 18 | | | | |
| | ABB79979 18 ABB53707 18 ABB02936 18 ABB02924 31 | | | | |
| | ABB02913 18 ABB02825 18 ABA87045 18 ABA43189 18 | | | | |
| | ABA42575 18 ABA42324 31 ABA42258 18 ABA42236 18 | | | | |
| | ABA18037 18 ABA12715 18 ABA08519 31 ABA08464 18 | | | | |
| | AAZ85126 18 AAZ83299 18 AAZ79604 18 AAZ38627 18 | | | | |
| | AAT85679 18 AAU25871 12 AAU25861 12 AAL47667 14 | | | | |
| | AAL47668 19 CAD29925 1 CAD29923 1 CAD29918 14 | | | | |
| | CAD29911 1 CAD29910 1 CAD29909 14 CAD29908 14 | | | | |
| | CAD29907 1 CAD29906 1 CAD29905 19 CAD29904 1 | | | | |
| | CAD29903 14 CAD29902 19 CAD29901 14 CAD29900 1 | | | | |
| | CAD57623 33 CAD57621 6 CAD57620 27 CAD57619 28 | | | | |
| | CAD57617 1 | | | | |
| 2002 | AAU25851 29 BAC82856 1 BAC82855 1 BAC82854 1 | 62 | 2.6 | 2.5 | low p < .001, |
| | BAC82853 1 BAC82852 1 BAC82851 1 BAC82850 1 | | | | prev p < .05 |
| | BAC82849 1 BAC82848 1 BAC82847 1 BAC82845 1 | | | | |
| | BAC82844 1 BAC82842 19 AAP69688 1 AAP69687 1 | | | | |
| | AAP69686 1 AAP69685 1 AAP69684 1 AAP69683 1 | | | | |
| | AAP69682 1 AAP69681 1 AAP69680 12 AAP69679 1 | | | | |
| | AAP69678 3 AAP69677 1 AAP69676 1 AAP69675 1 | | | | |
| | AAP69674 1 AAP69673 1 AAP69692 1 AAP69691 1 | | | | |
| | AAP69690 1 AAP69689 1 ABS76427 18 BAF63057 12 | | | | |
| | BAF63054 12 BAF63050 12 BAF63046 17 BAF63043 13 | | | | |
| | BAF63039 13 ABB19628 31 ABG72868 1 ABA87080 31 | | | | |
| | ABB82216 31 ABB51962 17 AAZ83253 28 AAT12706 29 | | | | |
| | ABS70411 30 ABS70400 30 ABS70389 30 ABS70378 30 | | | | |
| | ABS70367 30 ABS70337 30 ABS70326 30 ABS70316 30 | | | | |
| | ABS70305 30 CAD29958 14 CAD29914 14 CAD57618 28 | | | | |
| | CAD57616 14 CAD35678 19 | | | | |
| 2003 | ABB86907 43 ABB86887 37 ABB86877 37 BAF63102 13 | 94 | 4.9 | 1.1 | low p< .001, |
| | BAF63101 13 BAF63097 13 BAF63096 13 BAF63095 13 | | | | prev p < .001 |
| | BAF63091 13 BAF63090 13 BAF63089 13 BAF63085 13 | | | | |
| | BAF63084 13 BAF63083 13 BAF63082 13 BAF63078 13 | | | | |
| | BAF63075 13 BAF63072 13 BAF63068 13 BAF63064 13 | | | | |
| | BAF63061 13 ABQ10105 16 ABQ10104 14 ABQ10103 14 | | | | |
| | ABQ10102 14 ABO37999 31 ABN51088 31 ABM67051 31 | | | | |
| | ABI96088 14 ABI96127 14 ABI96126 14 ABI96125 14 | | | | |
| | ABI96124 11 ABI96123 14 ABI96122 14 ABI96121 14 | | | | |
| | ABI96120 14 ABI96119 16 ABI96118 17 ABI96117 14 | | | | |
| | ABI96116 14 ABI96115 14 ABI96114 14 ABI96113 14 | | | | |
| | ABI96112 11 ABI96111 14 ABI96110 14 ABI96109 31 | | | | |
| | ABI96108 30 ABI96107 31 ABI96105 14 ABI96103 31 | | | | |
| | ABI96100 14 ABI96098 14 ABI96097 14 ABI96096 14 | | | | |
| | ABI96095 14 ABI96094 14 ABI96093 14 ABI96090 14 | | | | |
| | ABE12634 57 ABD78104 51 ABD60779 28 ABD15515 28 | | | | |
| | ABC41714 31 ABB03123 31 ABA87057 31 AAZ83977 31 | | | | |
| | ABB82205 36 ABB80103 31 ABB53740 31 ABB03145 31 | | | | |
| | ABB02803 31 ABB02792 28 ABA42247 36 ABA18145 31 | | | | |
| | ABA12729 28 ABA12707 31 ABA12696 31 ABA08475 36 | | | | |
| | ABK39995 31 ABB86917 31 1RUZ_M 19 1RUZ_L 19 | | | | |
| | 1RUZ_K 19 1RUZ_J 19 1RUZ_I 19 1RUZ_H 19 1RUY_M 15 | | | | |
| | 1RUY_L 15 1RUY_K 15 1RUY_J 15 IRUY_I 15 1RUY_H 15 | | | | |
| 2004 | ABB86946 40 ABB86937 44 ABS00326 34 ABQ10005 26 | 36 | 5.3 | 1.4 | low p < .001, |
| | ABQ10004 20 ABQ10003 14 ABQ10002 14 ABQ10001 26 | | | | prev p < .10 |
| | ABQ09988 14 ABQ09838 22 ABQ09837 28 ABQ09784 14 | | | | |
| | ABQ09783 29 ABQ09782 29 ABQ09780 27 ABQ09779 29 | | | | |
| | ABI96132 14 ABI96130 14 ABI96129 14 ABI54447 13 | | | | |
| | ABI54446 13 ABI54445 13 ABI54444 13 ABI54443 13 | | | | |
| | ABI54442 13 ABI54441 13 ABI54440 13 ABI54439 13 | | | | |
| | ABI54438 13 ABI54437 13 ABE27153 46 ABC42750 46 | | | | |
| | ABB86929 31 ABB86899 31 AAV68006 15 AAV67984 13 | | | | |
| 2005 | ABJ51893 13 ABI51313 13 ABO52104 30 ABC66245 14 | 82 | 4.9 | 1.5 | low p < .001, |
| | ABC66244 14 ABC66243 14 ABC66242 14 ABC66241 14 | | | | prev p < .10 |
| | ABC66240 14 ABC66239 14 ABC66238 14 ABC66237 14 | | | | |
| | ABC66236 14 ABC66235 14 ABC66234 14 ABW75642 18 | | | | |
| | ABI19015 41 ABK57093 35 ABR28900 31 ABJ51895 13 | | | | |
| | ABJ51894 13 ABJ51892 13 ABJ51891 13 ABJ51890 13 | | | | |
| | BAF63115 13 BAF63111 13 BAF63107 13 BAF63103 13 | | | | |
| | ABQ09953 14 ABQ09950 27 ABQ09949 14 ABQ09948 13 | | | | |
| | ABQ09947 14 ABQ09915 14 ABQ09914 14 ABQ09913 14 | | | | |
| | ABQ09904 14 ABQ09874 14 ABQ09873 14 ABQ09872 14 | | | | |
| | ABQ09871 16 ABP51970 14 ABP49393 31 ABO32970 31 | | | | |
| | ABO32678 37 ABO21731 14 ABO21730 14 ABK40689 31 | | | | |
| | ABJ16686 31 ABJ16675 31 ABJ16664 31 ABJ16653 31 | | | | |
| | ABJ09184 31 ABI96148 14 ABI96147 32 ABI96146 14 | | | | |
| | ABI96145 27 ABI96144 13 ABI96143 29 ABI96142 14 | | | | |
| | ABI96141 14 ABI96140 14 ABI96139 14 ABI96138 14 | | | | |
| | ABI96137 14 ABI96135 14 ABI96134 14 ABI96128 16 | | | | |
| | ABI92379 31 ABI30565 31 ABI22109 31 ABI21233 31 | | | | |
| | ABI21222 31 ABI21211 31 ABI21200 31 ABI21189 31 | | | | |
| | ABG72865 1 ABG72864 1 ABG72863 1 BAE53730 14 | | | | |
| | BAE53729 14 ABB84190 14 | | | | |
| 2006 | BAE96542 25 BAE96541 14 BAE96540 14 BAE96539 25 | 135 | 5.2 | 1.7 | low p < .001, |
| | BAE96538 14 BAE96537 14 BAE96536 25 BAE96535 14 | | | | prev p < .20 |
| | BAE96534 14 BAE96533 14 ABW71294 31 ABW23335 40 | | | | |
| | ABW23328 31 ABW23327 14 ABW23324 27 ABW23321 14 | | | | |
| | ABW23320 31 ABW23318 14 ABW23317 27 ABW23314 30 | | | | |
| | ABW23311 14 ABW23310 14 ABW23308 13 ABW23307 14 | | | | |
| | ABW23306 14 ABW23303 14 ABW23300 14 ABW23296 31 | | | | |
| | ABW23295 31 ABW23294 29 ABW23291 14 ABW23290 31 | | | | |
| | ABW23289 17 ABW23287 14 ABW23286 31 ABW23285 13 | | | | |
| | ABW23284 14 ABW23283 1 ABW23280 14 ABW23279 14 | | | | |
| | ABW23275 14 ABV45654 31 ABV29557 31 ABV29546 31 | | | | |
| | ABV29535 18 ABU99109 44 ABU99069 25 ABU99067 27 | | | | |
| | ABU50589 44 ABU50588 44 ABU50587 44 ABU50586 42 | | | | |
| | ABU50574 18 ABU50573 31 ABU50571 31 ABU50570 31 | | | | |
| | ABU50569 31 ABU50568 31 ABU50567 31 ABU50566 18 | | | | |
| | ABU50565 31 ABU50556 11 ABU50555 26 ABU50554 14 | | | | |
| | ABU50553 14 ABU50552 26 ABU50551 23 ABU50550 23 | | | | |
| | ABU50549 14 ABU50546 17 ABU50545 28 ABU50544 13 | | | | |
| | ABU50543 14 ABU50542 1 ABU50541 13 ABU50540 1 | | | | |
| | ABU50539 14 ABU50538 23 ABU50537 14 ABU50536 1 | | | | |
| | ABU50535 14 ABU50534 31 ABU50518 27 ABU50517 23 | | | | |
| | ABS00315 31 BAF63135 14 BAF63131 14 BAF63127 25 | | | | |
| | BAF63123 18 BAF63119 14 ABQ09984 25 ABQ09981 25 | | | | |
| | ABQ09977 31 ABQ09976 25 ABQ09975 25 ABQ09974 27 | | | | |
| | ABQ09973 25 ABQ09972 25 ABQ09969 27 ABQ09968 25 | | | | |
| | ABQ09961 29 ABQ09960 29 ABQ09958 29 ABQ09957 26 | | | | |
| | ABQ09956 25 ABQ09955 19 ABK79959 31 ABI96174 27 | | | | |
| | ABI96173 14 ABI96172 14 ABI96171 14 ABI96170 14 | | | | |
| | ABI96169 14 ABI96168 14 ABI96167 14 ABI96166 25 | | | | |
| | ABI96165 14 ABI96164 14 ABI96163 14 ABI96162 19 | | | | |
| | ABI96161 14 ABI96160 14 ABI96159 14 ABI96158 14 | | | | |
| | ABI96157 14 ABI96156 14 ABI96155 14 ABI96154 14 | | | | |
| | ABI96153 27 ABI96152 27 ABI96151 14 ABI96150 14 | | | | |
| | ABI96149 27 ABH07371 29 ABH07372 29 | | | | |
| 2007 | ABS71673 46 ABS71672 46 ABS71671 46 ABS71670 46 | 285 | 5.5 | 1.2 | low p < .001, |
| | ABS71669 46 ABS71668 46 ABS71667 46 ABS71666 46 | | | | prev p < .02 |
| | ABS71665 46 ABS71664 46 ABQ52695 35 ABW34451 23 | | | | |
| | ABW86606 31 ABW86552 31 ABW86541 31 ABW86530 31 | | | | |
| | ABW86519 31 ABW86508 31 ABW86497 18 ABW86486 31 | | | | |
| | ABW86475 31 ABW86464 31 ABW86453 31 ABW86442 31 | | | | |
| | ABW86431 31 ABW86420 31 ABW86409 31 ABW86398 18 | | | | |
| | ABW86387 31 ABW86376 31 ABW86365 31 ABW86354 31 | | | | |
| | ABW86343 31 ABW86332 30 ABW86321 18 ABW71470 31 | | | | |
| | ABW71459 31 ABW71448 31 ABW71437 31 ABW71426 31 | | | | |
| | ABW71415 31 ABW71404 31 ABW71393 31 ABW71382 31 | | | | |
| | ABW71371 31 ABW71360 18 ABW71338 31 ABW71327 31 | | | | |
| | ABW71316 31 ABW71305 18 ABW40675 31 ABW40664 18 | | | | |
| | ABW40642 31 ABW40620 31 ABW40609 31 ABW40598 18 | | | | |
| | ABW40576 31 ABW40565 31 ABW40554 30 ABW40543 31 | | | | |
| | ABW40532 31 ABW40521 31 ABW40510 18 ABW40499 31 | | | | |
| | ABW40488 31 ABW40477 31 ABW40466 31 ABW40455 31 | | | | |
| | ABW40444 31 ABW40433 18 ABW40422 31 ABW40411 31 | | | | |
| | ABW40400 31 ABW40389 31 ABW40367 31 ABW40356 31 | | | | |
| | ABW40345 18 ABW40334 18 ABW40312 30 ABW40301 30 | | | | |
| | ABW40290 31 ABW40279 31 ABW40257 31 ABW40235 31 | | | | |
| | ABW40224 31 ABW40213 31 ABW40202 31 ABW40180 31 | | | | |
| | ABW40158 31 ABW40147 31 ABW40125 31 ABW40114 31 | | | | |
| | ABW40103 31 ABW40092 33 ABW40070 43 ABW40059 31 | | | | |
| | ABW40048 33 ABW40037 31 ABW40015 18 ABW40004 31 | | | | |
| | ABW39993 31 ABW39982 31 ABW39971 42 ABW39960 31 | | | | |
| | ABW39949 31 ABW39927 31 ABW39916 40 ABW39905 31 | | | | |
| | ABW39894 31 ABW39883 33 ABW39861 31 ABW39850 40 | | | | |
| | ABW39839 27 ABW39828 46 ABW39817 30 ABW39806 31 | | | | |
| | ABW39777 31 ABW36300 30 ABW36289 31 ABW36278 31 | | | | |
| | ABW36267 31 ABW36256 43 ABW36245 31 ABW36234 31 | | | | |
| | ABW36223 31 ABW36212 31 ABW36201 31 ABW36190 31 | | | | |
| | ABW36179 31 ABW23343 33 ABW23342 44 ABW23341 36 | | | | |
| | ABW23340 31 ABW23339 30 ABW23338 31 ABW23337 31 | | | | |
| | ABW23336 36 ABW23329 14 ABW23326 14 ABW23325 31 | | | | |
| | ABW23323 31 ABW23322 27 ABW23319 31 ABW23316 14 | | | | |
| | ABW23315 40 ABW23313 31 ABW23312 46 ABW23309 14 | | | | |
| | ABW23305 31 ABW23304 31 ABW23302 31 ABW23301 14 | | | | |
| | ABW23299 46 ABW23298 13 ABW23297 1 ABW23293 31 | | | | |
| | ABW23292 18 ABW23288 31 ABW23282 31 ABW23281 31 | | | | |
| | ABW23278 14 ABW23277 31 ABW23276 38 ABW23274 1 | | | | |
| | ABW23273 31 ABV82551 30 ABV45959 31 ABV45948 31 | | | | |
| | ABV45937 31 ABV45926 30 ABV45915 31 ABV45893 30 | | | | |
| | ABV45882 31 ABV45871 31 ABV30624 31 ABV30613 32 | | | | |
| | ABV30602 31 ABV30591 31 ABV30580 31 ABV30569 31 | | | | |
| | ABV30558 31 ABV30547 30 ABV30536 31 ABV30525 31 | | | | |
| | ABV30503 31 ABV30492 31 ABV30459 31 ABV30371 31 | | | | |
| | ABV30360 31 ABV30349 31 ABV30338 31 ABV30327 18 | | | | |
| | ABV30316 31 ABV30305 31 ABV30294 18 ABV30283 31 | | | | |
| | ABV30195 31 ABV30184 31 ABV30173 31 ABV30162 31 | | | | |
| | ABV30151 31 ABV30140 21 ABV30129 31 ABV30107 31 | | | | |
| | ABV30096 31 ABV30085 31 ABV30052 31 ABV30041 31 | | | | |
| | ABV30030 31 ABV30019 31 ABV30008 31 ABV29997 31 | | | | |
| | ABV29986 31 ABV29975 31 ABV29964 31 ABV29953 31 | | | | |
| | ABV29942 30 ABV29920 31 ABV29887 31 ABV29876 31 | | | | |
| | ABV29865 31 ABV29854 31 ABV29843 31 ABV29832 31 | | | | |
| | ABV29799 31 ABV29788 31 ABV29777 30 ABV29766 31 | | | | |
| | ABV29755 31 ABV29744 31 ABV29733 30 ABV29700 31 | | | | |
| | ABV29689 31 ABV29678 31 ABV29667 31 ABV29656 31 | | | | |
| | ABV29645 31 ABV29634 31 ABV29612 31 ABV29601 30 | | | | |
| | ABV29579 35 ABV29568 31 ABU50572 31 ABS71683 46 | | | | |
| | ABS71682 46 ABS71681 46 ABS71680 46 ABS71679 46 | | | | |
| | ABS71678 46 ABS71677 46 ABS71676 46 ABS71675 46 | | | | |
| | ABS71674 46 ABW91636 31 ABW91625 31 ABW91614 31 | | | | |
| | ABW91603 18 ABW91592 31 ABW91581 31 ABW91570 30 | | | | |
| | ABW91559 31 ABW91537 31 ABW91526 30 ABW91515 31 | | | | |
| | ABW91504 31 ABW91493 35 ABW91482 18 ABW91471 31 | | | | |
| | ABW91460 18 ABW91449 18 ABW91427 31 ABW91416 31 | | | | |
| | ABW91405 18 ABW91383 31 ABW91372 31 ABW91361 30 | | | | |
| | ABW91350 31 ABW91339 31 ABW91328 28 ABW91317 31 | | | | |
| | ABW91306 31 ABW91295 31 ABW91284 42 ABW91273 31 | | | | |
| | ABW91218 31 | | | | |

### Example 14

### Replikin Count Analysis in Equine Influenza Virus H3N8

[0487] Applicants analyzed publicly available sequences for isolates of EIV from PubMed using proprietary search tool software (ReplikinForecast™ available in the United States from REPLIKINS LLC, Boston, Mass.). The data is contained in Table 22, below, and Table 4, above, and graphically described in FIG. 7.

[0488] Table 22 provides the data for Replikin concentration for publicly available sequences of the pB1 gene area of the H3N8 strain of influenza virus from 1963 to 2005. Sequences were publicly available under accession numbers at www.pubmed.com. Standard deviation and significance as compared to the mean Replikin Count of the previous year and of the lowest mean Replikin Count within the data set are also provided along with the mean Replikin Count for each year. Where data was not available in a given year the year is not

TABLE 22
H3N8 pB1

| | | No. of | Mean | | |
|---|---|---|---|---|---|
| | | Isolates | Replikin | | |
| | | per | Count per | | |
| Year | PubMed Accession Number-Replikin Count | year | year | S.D. | Significance |
| 1963 | ABB88376 14 | 1 | 1.8 | 0.0 | |
| 1972 | ABI84585 14 | 1 | 1.8 | 0.0 | |
| 1977 | ABB19675 15 | 1 | 16.7 | 0.0 | |
| 1978 | ABB20350 15 ABB88317 18 | 2 | 11.0 | 12.7 | low p < 0.40, prev p > 0.50 |
| 1979 | ABB87407 20 ABB86793 20 | 2 | 22.2 | 0.0 | prev p < 0.30 |
| 1980 | ABB87797 20 ABB20412 14 BAF32965 14 Q08II5 14 | 5 | 6.7 | 8.8 | low p < 0.20, prev p < 0.01 |
| | Q08II4 5 | | | | |
| 1982 | ABI84945 16 | 1 | 17.8 | 0.0 | prev p < 0.04 |
| 1985 | ABB19731 20 ABB19720 17 | 2 | 20.6 | 2.4 | low p < 0.05, prev p < 0.30 |
| 1986 | ABO52134 17 ABJ09104 25 ABP49539 14 P16505 17 | 5 | 13.3 | 11.1 | low p < 0.05, prev p < 0.20 |
| | AAA43638 17 | | | | |
| 1987 | ABL67228 14 ABL67849 15 ABM66861 20 ABI95482 | 4 | 19.1 | 2.7 | low p < 0.001, |
| | 15 | | | | prev p < 0.30 |
| 1991 | ABM21946 15 ABI84419 15 | 2 | 9.3 | 10.4 | low p < 0.40, prev p < 0.20 |
| 1992 | ABB88191 14 | 1 | 15.6 | 0.0 | prev p > 0.50 |
| 1998 | AAT65279 6 AAT65275 6 AAT65264 6 AAT65263 6 | 6 | 2.2 | 0.0 | low p < 0.001, |
| | AAT65251 6 AAT65249 6 | | | | prev p < 0.001 |
| 1999 | AAZ23576 15 | 1 | 2.0 | 0.0 | prev p < 0.001 |
| 2001 | ABB19766 16 AAN15147 5 | 2 | 9.9 | 11.2 | low p < 0.40, prev p > 0.50 |
| 2002 | AAZ23577 15 ABI47978 14 ABO51892 14 ABO51870 | 5 | 4.6 | 6.1 | low p < 0.30, prev p > 0.50 |
| | 14 AAX23573 15 | | | | |
| 2003 | AAZ23578 15 AAZ23575 15 AAZ23574 15 | 6 | 2.0 | 0.0 | low p < 0.001, |
| | AAZ23573 15 AAZ23572 15 ABB17181 15 | | | | prev p < 0.30 |
| 2004 | AAZ23571 15 ABJ53167 5 ABD27777 6 ABD27776 6 | 5 | 2.2 | 0.2 | low p < 0.01, prev p < 0.02 |
| | ABD27775 6 | | | | |
| 2005 | ABS89395 16 ABR37470 16 ABO52651 16 | 13 | 18.5 | 2.8 | low p < 0.001, |
| | ABO76921 16 ABO52684 16 ABO52640 16 | | | | prev p < 0.001 |
| | ABL67140 16 ABL67118 16 ABK79945 16 ABJ09126 | | | | |
| | 16 ABI92277 16 ABI92266 16 ABO52101 25 | | | | |

[0489] As may be seen in Table 22 over the 42 year period for which sequence information is publicly available for H3N8 isolates, the cyclic nature of changes in Replikin concentration becomes evident. Where Replikin concentrations reach a high within the cycle, an epidemic occurs within about 1 to about 2 years. For example, a high of 22.2 Replikin sequences per 100 amino acids in 1979 falls to 2 Replikin sequences per 100 amino acids in 1998 and 1999 with no epidemics reported between 1995 and 2001. The Replikin concentration then appears to be on its way up again in 2001 with epidemics following in the United Kingdom and in Germany in 2002 and 2003, respectively, and then falls back to around 2 in 2003 and 2004 with a marked increase in 2005 to 18.5 that approaches the highs of 1979. Epidemics follow the 2005 increase in Australia, Italy and Japan in 2007.

[0490] Table 23 provides the data for Replikin concentration for publicly available sequences of the pB2 gene of the H3N8 strain of influenza virus from 1963 to 2005. Sequences were available under accession numbers at www.pubmed.com. Standard deviation and significance as compared to the mean Replikin Count of the previous year and of the lowest mean Replikin Count within the data set are also provided along with the mean Replikin Count for each year

TABLE 23
H3N8 pB2

| | | | Mean | | |
|---|---|---|---|---|---|
| | | No. of | Replikin | | |
| | | Isolates | Count per | | |
| Year | PubMed Accession Number-Replikin Count | per year | year | S.D. | Significance |
| 1963 | ABB88378 18 | 1 | 2.4 | 0.0 | |
| 1972 | ABI84587 18 | 1 | 2.4 | 0.0 | |
| 1977 | ABB19677 18 | 1 | 2.4 | 0.0 | |
| 1978 | ABB20352 18 ABB88319 18 | 2 | 2.4 | 0.0 | |
| 1979 | ABB87409 18 ABB86795 18 | 2 | 2.4 | 0.0 | |
| 1980 | ABI84488 14 ABB87799 19 BAF32964 18 Q08II6 | 4 | 2.3 | 0.3 | low p > 0.50, prev p > 0.50 |
| | 18 | | | | |
| 1981 | | | | | |
| 1982 | ABI84947 18 | 1 | 2.4 | 0.0 | prev p > 0.50 |
| 1985 | ABB19733 18 ABB19722 18 | 2 | 2.4 | 0.0 | |
| 1986 | ABO52136 18 ABJ09106 18 ABP49541 17 | 5 | 2.3 | 0.1 | low p < 0.30, prev p < 0.30 |
| | AAA43133 18 P26105 18 | | | | |
| 1987 | ABL67230 18 ABL67851 18 ABM66863 18 | 4 | 2.4 | 0.0 | prev p < 0.30 |
| | ABI95484 18 | | | | |
| 1991 | ABM21948 18 ABI84421 18 | 2 | 2.4 | 0.0 | |
| 1992 | ABB88193 18 | 1 | 2.4 | 0.0 | |
| 1998 | AAT65244 18 AAT65240 18 AAT65229 18 | 6 | 3.8 | 0.0 | |
| | AAT65228 18 AAT65216 18 AAT65214 18 | | | | |
| 1999 | AAZ23564 1 | 1 | 0.2 | 0.0 | |
| 2000 | AAG10729 1 | 1 | 0.6 | 0.0 | |
| 2001 | ABB19768 18 | 1 | 2.4 | 0.0 | |
| 2002 | AAZ23563 18 ABI47980 18 ABO51894 18 | 5 | 2.4 | 0.1 | low p < 0.30, prev p < 0.30 |
| | ABO51872 18 AAX23572 18 | | | | |
| 2003 | AAZ23567 18 AAZ23566 18 AAZ23565 18 | 6 | 2.4 | 0.0 | low p < 0.30, prev p > 0.50 |
| | AAZ23562 18 AAZ23561 18 ABB17182 18 | | | | |
| 2004 | AAZ23560 18 | 1 | 2.4 | 0.0 | prev p < 0.30 |
| 2005 | ABS89397 18 ABR37472 18 ABO52653 18 | 13 | 2.3 | 0.1 | low p < 0.10, prev p < 0.10 |
| | ABO76923 16 ABO52686 18 ABO52642 18 | | | | |
| | ABL67142 18 ABL67120 18 ABK79947 18 | | | | |
| | ABJ09128 18 ABI92279 18 ABI92268 16 | | | | |
| | ABO52103 18 | | | | |

[0491] A review of the Replikin concentrations of available sequences for the pB2 gene area of the H3N8 strain of influenza virus reveals much less variability in the Replikin concentration through the years. The pB2 Replikin concentration can be considered control data that validate the location of the most significant Replikin Peak Gene for the present isolates of virus in the pB1 gene area. Because the pB2 gene is right next to the pB1 gene, the difference in variability in Replikin Count between these neighboring areas is remarkable.

[0492] Data from a review of the Replikin Count of available sequences for the pA gene area of the H3N8 strain of influenza virus may be seen in FIG. 7. The data also reveal much less variability in the Replikin concentration through the years as compared to the pB1 gene area. As with the pB2 Replikin concentration, the pA Replikin concentration can be considered control data that validate the location and uniqueness of the most significant Replikin Peak Gene for the present isolates of virus in the pB1 gene area. The significance of these observations is further increased when it is realized that these quantitative annual measures for each of three areas of the EIV genome are an objective determination by software scanning and counting of the virus proteins of each of the viruses isolated and reported annually at www.pubmed.com.

[0493] Applicants analyzed publicly available sequences for isolates of EIV from years 1942 to 2007 and determined the mean whole genome Replikin Count for all isolates having genomic sequences in each year for which they were available.

[0494] A list of the accession numbers analyzed by FluForecast® (REPLIKINS LLC, Boston, Mass.) for the presence and concentration of Replikin sequences is provided in Table 24 below. The mean Replikin concentration for each year is provided following the list of accession numbers from isolates in each corresponding year. Standard deviation and significance as compared to the mean Replikin concentration of the previous year and of the lowest mean Replikin concentration within the data set are also provided along with the mean Replikin concentration for each year.

TABLE 24
Equine Influenza Whole Genome

| | | No. of | Mean | | |
|---|---|---|---|---|---|
| | | Isolates | Replikin | | |
| | | per | Count | | |
| Year | PubMed Accession Number-Replikin Count | year | per year | S.D. | Significance |
| 1942 | BAF49412 9 | 1 | 1.9 | 0.0 | |
| 1956 | ABB20499 4 AAA43411 1 ABB20504 2 ABB20503 2 ABB20502 8 | 21 | 2.2 | 1.3 | low p < 0.30 |
| | ABB20500 4 ABB20501 16 AAC57418 16 AAA43290 4 | | | | |
| | AAA43289 4 AAA43140 18 CAA44429 30 AAA43108 3 | | | | |
| | AAC35566 1 AAA52233 8 AAB51006 2 AAB51005 2 P88838 16 | | | | |
| | P26101 30 P26107 18 P16980 8 | | | | |
| 1957 | AAA64363 43 AAA64366 43 AAA64365 43 AAA64364 43 | 5 | 7.4 | 0.6 | low p < 0.001, |
| | AAA64362 36 | | | | prev p < 0.001 |
| 1963 | AAA43114 7 AAA43105 7 CAA44430 30 AAA43164 7 AAA43106 | 13 | 1.6 | 1.7 | low p < 0.40, |
| | 3 AAA43409 1 AAC31272 3 AAC31273 3 Q07579 1 P15658 7 | | | | prev p < 0.001 |
| | P17002 7 P26094 30 P16979 3 | | | | |
| 1964 | CAA43815 32 CAA44432 32 AAC35580 2 P26097 32 P26096 32 | 5 | 4.7 | 2.1 | low p < 0.04, |
| | | | | | prev p < 0.01 |
| 1966 | CAA44433 29 P26098 29 | 2 | 5.1 | 0.0 | prev p > 0.50 |
| 1969 | AAA43429 3 Q07581 3 | 2 | 0.6 | 0.0 | |
| 1971 | AAA43111 12 P17000 12 | 2 | 2.1 | 0.0 | |
| 1972 | AAA43100 12 CAA44434 34 AAA43355 1 Q07576 1 P26103 34 | 6 | 2.8 | 2.6 | low p < 0.40, |
| | P16994 12 | | | | prev p > 0.50 |
| 1973 | AAA43174 32 AAA43141 18 CAA44437 32 CAA44435 32 | 15 | 3.4 | 1.7 | low p < 0.005, |
| | AAA43104 27 AAA43637 17 AAA43457 7 AAB51000 2 | | | | prev p > 0.50 |
| | AAB50999 2 P26099 32 P26095 32 P26106 18 P16504 17 P13168 | | | | |
| | 27 P15673 7 | | | | |
| 1974 | AAA43093 16 P08327 16 | 2 | 3.4 | 0.0 | prev p > 0.50 |
| 1976 | AAA43107 6 AAA43101 6 CAA44436 32 ABF60576 6 P16995 6 | 7 | 2.4 | 2.2 | low p > 0.50, |
| | P26102 32 P16997 6 | | | | prev p < 0.20 |
| 1977 | AAC31296 3 CAA44431 32 AAQ90292 32 AAQ90288 7 | 9 | 3.0 | 2.0 | low p < 0.10, |
| | AAC31297 3 AAC31251 2 AAC31250 2 AAQ90293 16 P26100 32 | | | | prev p > 0.50 |
| 1978 | | | | | |
| 1979 | AAA43427 3 AAC31274 3 AAC31275 3 AAC31249 2 AAC31248 2 | 5 | 1.3 | 0.4 | low p < 0.02, |
| | | | | | prev p < 0.02 |
| 1980 | AAA43109 6 P16998 6 | 2 | 1.1 | 0.0 | prev p < 0.30 |
| 1981 | AAB02560 6 AAC31276 3 AAQ55062 7 AAC31277 3 AAA43245 3 | 7 | 1.0 | 0.3 | low p < 0.001, |
| | P08326 3 Q82559 6 | | | | prev p > 0.50 |
| 1985 | AAQ90291 6 AAQ90289 15 AAQ90290 3 AAA43112 6 AAA43110 | 8 | 1.4 | 1.0 | low p < 0.10, |
| | 4 Q6TXB9 3 P16999 4 Q6TXC0 15 | | | | prev p < .40 |
| 1986 | AAA43292 3 AAA43288 3 AAA43291 3 AAA43287 3 AAA43133 | 23 | 2.0 | 1.2 | low p > 0.50, |
| | 18 AAA43102 6 AAA43113 32 AAA43638 17 AAA43479 15 | | | | prev p < 0.10 |
| | AAA43458 15 AAB51002 2 AAB51001 2 AAA43430 3 NMIVEA | | | | |
| | 16 NMIVEK 3 Q07582 3 P17001 6 P19699 6 P26105 18 P16505 17 | | | | |
| | P13169 32 P67915 15 P67914 15 | | | | |
| 1987 | CAC84083 3 AAA43103 6 CAD23745 2 P16996 6 | 4 | 1.3 | 0.7 | low p < 0.10, |
| | | | | | prev p < 0.05 |
| 1988 | AAC31278 3 CAA74382 3 AAC31279 3 AAC31255 2 AAC31254 2 | 7 | 1.4 | 0.3 | low p < 0.005, |
| | AAC31253 2 AAC31252 2 | | | | prev p > 0.50 |
| 1989 | AAC31280 3 AAA43254 4 AAC31281 3 AAC31257 2 AAC31256 2 | 25 | 1.3 | 0.5 | low p < 0.001, |
| | AAA52247 3 AAA43253 4 AAA43151 12 AAA43374 3 CAA48482 | | | | prev p < 0.30 |
| | 6 HMIVEE 6 HMIVET 6 HMIVE9 6 HMIVE8 4 HMIVE7 6 | | | | |
| | HMIVE6 6 HMIVE5 6 HMIVE4 12 HMIVE3 12 HMIVE2 7 | | | | |
| | HMIVE1 7 Q07578 3 Q08011 6 Q03909 12 P26068 3 | | | | |
| 1990 | AAB36977 9 | 1 | 1.6 | 0.0 | prev p < 0.002 |
| 1991 | ABM21939 3 AAB36980 6 ABM21948 18 ABM21946 15 | 28 | 1.5 | 0.8 | low p < 0.01, |
| | ABM21945 33 ABM21944 2 ABM21943 2 ABM21942 15 | | | | prev p > 0.50 |
| | ABM21940 3 ABM21938 6 AAC31284 3 AAC31282 3 ABM21947 | | | | |
| | 15 ABM21941 3 CAA64893 6 CAA64894 6 AAC31285 3 | | | | |
| | AAC31283 3 AAC31261 2 AAC31260 2 AAC31259 2 AAC31258 2 | | | | |
| | AAA43354 3 AAC31286 3 AAC31287 3 AAC31263 2 AAC31262 2 | | | | |
| | Q07575 3 | | | | |
| 1992 | AAB36979 6 AAC31292 3 AAC31293 3 AAC31269 2 AAC31268 2 | 15 | 1.6 | 1.0 | low p < 0.20, |
| | AAA62470 6 AAC31290 3 AAC31288 3 A45591 30 AAC31291 3 | | | | prev p > 0.50 |
| | AAC31289 3 AAC31267 2 AAC31266 2 AAC31265 2 AAC31264 2 | | | | |
| 1993 | AAB27733 6 AAB36978 6 AAB36975 6 AAC31294 4 S33703 6 | 8 | 1.3 | 0.3 | low p < 0.001, |
| | AAC31295 4 AAC31271 2 AAC31270 2 | | | | prev p < 0.30 |
| 1994 | AAB36976 6 | 1 | 1.1 | 0.0 | prev p < 0.02 |
| 1995 | NP_034974 16 | 1 | 0.6 | 0.0 | |
| 1996 | AAC23906 23 | 1 | 3.5 | 0.0 | |
| 1998 | AAF22345 3 | 1 | 0.9 | 0.0 | |
| 1999 | ABA39843 6 AAZ23576 15 AAZ23564 1 ABA39854 3 | 4 | 1.0 | 0.8 | low p < 0.05, |
| | | | | | prev p > 0.50 |
| 2000 | AAQ18435 3 NP_898880 2 NP_057292 2 | 3 | 0.9 | 0.0 | low p < 0.001, |
| | | | | | prev p > 0.50 |
| 2001 | CAC69619 13 CAC69618 14 CAC69617 13 CAC69616 13 | 37 | 3.1 | 2.0 | low p < 0.001, |
| | CAC69615 14 CAC69614 13 CAC69613 14 CAC69612 33 | | | | prev p < 0.001 |
| | CAC69611 33 CAC69610 29 CAC69609 29 CAC69608 3 | | | | |
| | AC69607 4 CAC69606 4 CAC69605 14 CAC69604 15 CAC69603 | | | | |
| | 10 CAC69602 11 CAC69601 11 CAC69600 11 CAC69599 4 | | | | |
| | CAC69598 3 CAC69597 4 CAC69593 20 CAC69592 18 CAC69589 | | | | |
| | 20 CAC69588 18 ABF69262 3 ABF69265 18 ABF69264 11 | | | | |
| | ABF69263 27 ABF69261 3 ABF69260 3 ABF69259 2 ABF69258 2 | | | | |
| | ABF69256 13 ABF69257 6 | | | | |
| 2002 | AAX23578 3 AAX23579 2 AAX23576 15 AAX23575 6 AAX23574 | 36 | 2.0 | 1.1 | low p > 0.50, |
| | 32 AAX23573 15 AAX23572 18 ABA42430 2 ABA42429 2 | | | | prev p < 0.002 |
| | ABA39845 6 AAZ23582 15 AAZ23577 15 AAZ23563 18 | | | | |
| | AAX23577 3 ABA39853 3 AAM88392 4 AAM88391 4 AAN99161 | | | | |
| | 14 AAN99160 15 AAN99159 10 AAN99158 11 AAN99157 11 | | | | |
| | AAN99156 11 AAN99155 4 AAN99154 4 AAN99153 4 AAN99152 | | | | |
| | 3 AAN99151 4 AAN99147 20 AAN99146 18 AAN99143 20 | | | | |
| | AAN99142 18 AAN99141 6 AAN99140 6 AAN99139 3 AAN99138 3 | | | | |
| 2003 | AAZ23570 32 ABA42439 3 ABA42437 3 ABA42440 3 ABA42438 | 53 | 1.8 | 1.1 | low p > 0.50, |
| | 3 ABA42432 2 ABA42431 2 ABA42428 2 ABA42427 2 ABA39849 | | | | prev p > 0.50 |
| | 6 ABA39848 6 ABA39847 6 ABA39846 6 AAZ23583 15 | | | | |
| | AAZ23581 2 AAZ23578 15 AAZ23575 15 AAZ23574 15 | | | | |
| | AAZ23573 15 AAZ23567 18 AAZ23566 18 AAZ23565 18 | | | | |
| | AAZ23562 18 ABB17177 3 ABA39858 3 ABA39857 2 ABA39856 | | | | |
| | 3 ABA39855 3 ABB17182 18 ABB17181 15 ABB17180 33 | | | | |
| | ABB17179 4 ABB17178 4 ABB17176 3 ABB17175 15 ABB17173 | | | | |
| | 6 ABA42435 3 ABB17174 3 ABA42436 3 ABA42426 2 ABA42425 | | | | |
| | 2 ABA39842 6 AAZ23580 15 AAZ23572 15 AAZ23569 32 | | | | |
| | AAZ23561 18 ABA39852 3 AAQ41575 20 AAQ41574 18 | | | | |
| | AAQ41573 6 AAQ41572 6 AAQ41571 3 AAQ41570 3 | | | | |
| 2004 | ABA42441 3 ABA42433 3 ABA42442 3 ABA42434 3 ABA42424 2 | 38 | 2.0 | 1.2 | low p > 0.50, |
| | ABA42423 2 ABA39850 6 ABA39844 6 AAZ23579 15 AAZ23571 | | | | prev p < 0.40 |
| | 15 AAZ23568 32 AAZ23560 18 ABA39851 5 AAW17902 20 | | | | |
| | AAW17901 18 AAW17900 6 AAW17899 6 AAW17898 3 | | | | |
| | AAW17897 3 AAS32565 14 AAS32564 15 AAS32563 10 | | | | |
| | AAS32562 11 AAS32561 11 AAS32560 11 AAS32559 4 AAS32558 | | | | |
| | 4 AAS32557 4 AAS32556 3 AAS32555 4 AAS32551 20 AAS32550 | | | | |
| | 18 AAS32547 20 AAS32546 18 AAS32545 6 AAS32544 6 | | | | |
| | AAS32543 3 AAS32542 3 | | | | |
| 2005 | ABM47075 6 | 1 | 1.1 | 0.0 | prev p < 0.001 |
| 2006 | ABI00612 2 ABI00611 2 ABI00610 13 ABI00609 14 ABI00608 13 | 30 | 3.5 | 2.1 | low p < 0.001, |
| | ABI00607 14 ABI00606 13 ABI00605 14 ABI00604 13 ABI00603 | | | | prev p < 0.001 |
| | 14 ABI00602 33 ABI00601 33 ABI00600 29 ABI00599 29 | | | | |
| | ABI00598 3 ABI00597 4 ABI00596 4 ABI00595 14 ABI00594 15 | | | | |
| | ABI00593 10 ABI00592 11 ABI00591 11 ABI00590 11 ABI00589 4 | | | | |
| | ABI00588 3 ABI00587 4 ABI00583 20 ABI00582 18 ABI00579 20 | | | | |
| | ABI00578 18 | | | | |
| 2007 | BAF49411 30 ABS92756 20 ABS92755 18 ABS92754 6 ABS92753 | 26 | 2.2 | 1.4 | low p < 0.20, |
| | 6 ABS92752 3 ABS92751 3 ABN35533 14 ABN35532 15 | | | | prev p < 0.005 |
| | ABN35531 10 ABN35530 11 ABN35529 11 ABN35528 11 | | | | |
| | ABN35527 4 ABN35526 4 ABN35525 4 ABN35524 3 ABN35523 4 | | | | |
| | ABN35519 20 ABN35518 18 ABN35515 20 ABN35514 18 | | | | |
| | ABN35513 6 ABN35512 6 ABN35511 3 ABN35510 3 | | | | |

### Example 15

### Analysis of Replikin Count in PCV to Predict Increased Morbidity and Mortality in PCV

[0495] Applicants analyzed publicly available sequences for isolates of PCV from www.pubmed.com using proprietary search tool software (ReplikinForecast™ available in the United States from REPLIKINS LLC, Boston, Mass.) from years 1997 to 2007 and determined the mean Replikin Count for all isolates in each of years 1997 through 2007. Applicants then compared the mean Replikin Count for each year with qualitative changes in infection rates and mortality in pigs in Canada.

[0496] A list of the accession numbers analyzed for the presence and concentration of Replikin sequences is provided in Table 25 below. The mean Replikin Count for each year is provided following the list of accession numbers from isolates in each corresponding year. Standard deviation and significance as compared to the mean Replikin Count of the previous year and of the lowest mean Replikin Count within the data set are also provided along with the mean Replikin Count for each year.

TABLE 25
PCV

| | Analyzed Accession Numbers with total number of identified Replikin sequences; Replikin |
|---|---|
| Year | Count and Statistical Analysis |
| 1997 | AAC98885 16 AAC59472 4 AAC59466 3 AAC59464 5 AAC59462 9 |
| | Total Number of Accession Numbers: 5 |
| | Mean Replikin Count: 9.4 |
| | Standard Deviation: +/−10.8 |
| | Significance as compared to lowest mean Replikin Count: p < .40 |
| 1998 | AAC35336 2 AAC35332 5 AAC35330 12 AAC35326 2 AAC35322 5 AAC35320 12 |
| | AAC35316 2 AAC35313 3 AAC35311 5 AAC35309 12 AAC35305 2 AAC35302 3 AAC35300 |
| | 5 AAC35298 12 NP_065678 16 CAA11157 12 AAC61865 5 AAC61863 3 AAC61861 5 |
| | AAC61860 18 AAC61741 18 AAC61739 18 AAC61737 18 AAC34819 16 AAF97593 14 |
| | AAD03091 3 AAD03090 2 AAD03087 5 AAD03086 12 AAD03075 4 AAD03080 2 |
| | AAD03073 5 AAD03071 12 AAD03069 2 AAD03065 2 AAD03063 5 AAD03061 12 O56124 |
| | 5 AAC69862 4 NP_047277 4 AAC69861 21 AAC34818 4 NP_047275 21 NP_048062 5 |
| | NP_048061 12 AAD11930 5 AAD11928 12 AAC69863 1 AAC34816 21 |
| | Total Number of Accession Numbers: 49 |
| | Mean Replikin Count: 6.1 |
| | Standard Deviation: +/−3.7 |
| | Significance as compared to lowest mean Replikin Count: p < .05 |
| | Significance as compared to previous mean Replikin Count p < .40 |
| 1999 | BAA88133 12 AAD50432 12 AAD38398 12 AAG41230 2 AAG41228 5 AAG41226 12 |
| | AAD37776 12 AAD45580 16 AAF35304 12 AAF35302 12 AAF35300 12 AAF35298 12 |
| | AAF35296 12 AAF35294 12 AAF35292 12 AAD12314 2 AAD12313 2 AAD12309 6 |
| | AAD12308 12 AAE81207 4 |
| | Total Number of Accession Numbers: 20 |
| | Replikin Count: 5.0 |
| | Standard Deviation: +/−3.3 |
| | Significance as compared to lowest mean Replikin Count: p < 0.50 |
| | Significance as compared to previous mean Replikin Count p > 0.20 |
| 2000 | CAC41085 12 CAC41084 12 CAC41083 11 AAL09364 12 AAL09363 12 AAF87238 12 |
| | AAF87236 12 AAF87234 12 AAF87232 12 AAF87230 12 AAF87228 12 NP_059530 2 |
| | NP_573443 5 NP_150370 4 CAD23544 5 CAC50263 4 AAG30569 3 AAG30566 8 AAG30563 |
| | 8 AAG30560 7 AAG30557 4 AAG30554 4 AAG30551 7 AAG30548 7 CAC24649 35 |
| | AAF74197 2 |
| | Total Number of Accession Numbers: 26 |
| | Replikin Count: 2.9 |
| | Standard Deviation: +/−1.2 |
| | Significance as compared to lowest mean Replikin Count: p < 0.001 |
| | Significance as compared to previous mean Replikin Count p > 0.005 |
| 2001 | AAK60464 5 AAK60462 12 AAL58397 12 BAB69442 5 BAB69441 12 BAB69439 2 |
| | BAB69438 5 BAB69437 12 BAB69435 3 BAB69433 5 BAB69432 12 AAK51544 14 |
| | AAK56300 12 AAK56298 12 AAK56296 12 AAL01081 4 AAL01080 1 AAL01077 5 |
| | AAL01075 12 NP_998971 5 NP_613078 4 AAM00235 4 AAN37998 4 AAN37994 3 |
| | AAN37990 3 AAN37986 3 AAN37982 4 AAN37978 3 AAN37974 4 AAN37970 3 AAN37966 |
| | 4 AAN37962 4 AAN37958 3 AAL13485 3 CAC50253 2 CAC50247 2 |
| | Total Number of Accession Numbers: 36 |
| | Replikin Count: 2.8 |
| | Standard Deviation: +/1.7 |
| | Significance as compared to lowest mean Replikin Count: p < 0.001 |
| | Significance as compared to previous mean Replikin Count p > 0.50 |
| 2002 | AAM61272 12 AAM61262 12 AAM61274 16 AAM61268 12 AAM61266 12 AAM61270 12 |
| | AAM61264 12 AAO24127 1 AAO39760 12 AAM21847 1 AAM21846 1 AAM21845 7 |
| | AAM21844 12 AAO24128 12 AAO24126 11 AAO24124 10 AAO24122 12 AAO23147 12 |
| | AAO23145 12 AAN81597 12 AAN06826 12 AAN62769 12 AAN62767 12 AAN62765 12 |
| | AAN16398 14 AAM83186 11 AAL69968 12 AAN77863 4 AAN77862 2 AAN77861 2 |
| | AAN77860 14 AAN77859 16 AAO39666 16 AAM76057 12 Q8BB16 12 YP_164519 4 |
| | ABA54889 4 ABA54887 4 ABA54885 4 AAR28043 4 AAO95302 12 AAO95299 |
| | Total Number of Accession Numbers: 42 |
| | Replikin Count: 3.5 |
| | Standard Deviation: +/1.4 |
| | Significance as compared to lowest mean Replikin Count: p < 0.001 |
| | Significance as compared to previous mean Replikin Count p > 0.05 |
| 2003 | AAP51128 12 AAS65982 1 AAS65993 12 AAS65991 12 AAS65989 12 AAS65987 12 |
| | AAS65985 12 AAS65983 12 AAS65981 9 AAS65979 12 AAS65977 12 AAS65975 12 |
| | AAP83635 12 AAP83633 12 AAP83631 12 AAP83629 12 AAP83627 12 AAP83625 12 |
| | AAP83623 12 AAP83621 12 AAP83619 12 AAP83617 12 AAP83615 12 AAP83613 12 |
| | AAP83611 12 AAP83609 12 AAP83607 12 AAP83605 12 AAP83603 12 AAP83601 12 |
| | AAP83599 12 AAP83597 12 AAP83595 12 AAP83593 12 AAP83591 12 AAR97518 1 |
| | AAR03722 12 AAR03720 12 AAR03718 12 AAR03716 12 AAQ94098 12 AAQ94096 12 |
| | AAQ94094 12 AAQ94092 12 AAQ94090 12 AAQ94088 12 AAP44190 5 AAP44188 12 |
| | AAP44187 5 AAP44185 12 AAP44184 5 AAP44182 12 AAO61773 12 AAR97517 12 |
| | AAQ96327 12 AAQ23156 5 AAQ23155 12 AAP42468 9 AAP42466 10 AAP42464 12 |
| | AAO61136 12 NP_937956 12 AAR03714 12 Q805H4 16 YP_209622 4 AAQ93492 6 |
| | AAP69227 4 AAR27947 1 AAT00481 5 AAT00473 4 AAT00471 4 AAT00469 4 AAS16932 6 |
| | AAS16931 7 AAS16930 6 AAS16929 6 AAS16928 6 AAS16927 6 AAS16926 6 AAS16925 6 |
| | AAS16924 6 |
| | Total Number of Accession Numbers: 81 |
| | Replikin Count: 3.4 |
| | Standard Deviation: +/1.0 |
| | Significance as compared to lowest mean Replikin Count: p < 0.001 |
| | Significance as compared to previous mean Replikin Count p > 0.50 |
| 2004 | AAU87520 1 AAT97651 2 AAT97647 1 YP_077191 16 AAW78483 16 AAW78481 20 |
| | AAW78479 20 AAW78477 20 AAW78475 12 AAW78473 12 AAW78471 12 AAW78469 12 |
| | AAW78467 12 AAW78465 12 AAW78463 12 AAV34141 20 AAV34139 12 AAU87519 12 |
| | AAU87517 12 AAU87515 12 AAU87513 12 AAU87511 12 AAU87509 12 AAU87507 12 |
| | AAU34001 10 AAU01913 14 AAT97650 12 AAT97648 12 AAT97646 12 AAT97644 12 |
| | AAT77546 1 AAT72755 16 AAT36358 12 AAU13781 1 AAX49397 12 AAU01966 12 |
| | AAT79579 12 AAT72901 12 AAT58234 11 AAS66199 1 AAS66197 1 AAS45844 12 |
| | AAS45843 12 CAJ31064 12 AAU13780 12 AAX52911 12 AAU87505 12 AAT39479 12 |
| | AAT39460 9 AAT37493 9 AAS66198 12 AAS66196 12 AAS66194 12 AAS66192 12 |
| | AAS66190 12 AAS90297 12 AAS89260 12 NP_999004 27 YP_271921 7 CAF25171 12 |
| | AAT51967 3 BAD90990 3 BAD90989 4 BAD90988 4 BAD90987 4 BAD90986 3 BAD90985 |
| | 3 AAS86324 4 AAS93283 6 AAS93279 6 AAS93276 5 AAS93272 9 AAS93268 6 AAS89814 |
| | 4 AAS89813 6 AAS89812 8 AAS89811 6 AAS89810 6 AAS89809 6 AAS89808 8 AAS89807 |
| | 9 AAS89806 8 AAS89805 5 AAS89804 4 AAS89803 4 AAS89802 5 AAS89801 7 AAS89800 |
| | 9 AAS89799 6 AAS89798 11 AAS89797 6 AAS89796 6 AAS89795 S AAS89794 5 AAS89793 |
| | 6 AAS89792 11 AAS89791 9 AAS89790 9 AAS89789 9 AAS89788 6 AAS89787 6 AAS89786 |
| | 6 AAS89785 6 AAS89784 6 AAS89783 6 AAS89782 6 AAS89781 6 |
| | Total Number of Accession Numbers: 107 |
| | Replikin Count: 3.3 |
| | Standard Deviation: +/1.3 |
| | Significance as compared to lowest mean Replikin Count: p < 0.001 |
| | Significance as compared to previous mean Replikin Count p > 0.30 |
| 2005 | ABJ98317 12 ABA29241 12 AAZ20802 11 AAZ20800 10 AAZ20798 11 AAZ20796 12 |
| | AAZ20794 12 AAW79865 9 ABC26025 12 ABA40480 12 AAZ78351 12 AAY40292 12 |
| | AAX21515 12 ABB29423 10 ABB29421 12 ABB29419 12 ABB29417 10 ABB29415 10 |
| | ABB29413 10 ABB29411 10 ABB29409 10 ABB29407 10 ABB29405 10 ABB29403 8 |
| | ABB29401 10 ABB29399 10 ABB36791 1 ABA60807 12 ABA60805 12 ABA60803 11 |
| | ABA40399 12 ABA40397 12 AAZ66792 11 AAX10150 12 AAX62053 16 AAX62051 12 |
| | AAX62049 12 AAX62047 12 AAX62045 12 AAX62043 16 AAX62041 12 ABC75103 12 |
| | ABB20934 12 ABA26910 12 ABA26908 10 AAY34249 12 YP_6109628 AAZ07884 7 |
| | ABB59615 8 ABA39170 3 ABA39166 3 AAX35672 1 ABA39162 4 ABA39158 3 ABA39154 |
| | 4 ABA39150 3 ABA39146 3 ABA39142 3 ABA39138 3 AAZ68049 2 AAZ68045 2 |
| | Total Number of Accession Numbers: 61 |
| | Replikin Count: 3.0 |
| | Standard Deviation: +/1.1 |
| | Significance as compared to lowest mean Replikin Count: p < 0.001 |
| | Significance as compared to previous mean Replikin Count p > 0.20 |
| 2006 | ABG21191 3 ABI29887 12 ABG21279 10 ABG21277 10 ABG21275 10 ABG21273 10 |
| | ABG21271 10 ABG21269 12 ABG21267 12 ABJ98319 12 ABI93799 16 ABI93797 12 |
| | ABD59347 12 ABG48510 14 ABD42928 12 ABM67071 16 ABM88864 12 ABM88862 12 |
| | ABM88860 12 ABI17537 12 ABI17535 12 ABI17533 12 ABI17531 12 ABI17529 12 |
| | ABI17527 12 ABI17525 12 ABI17523 12 ABG37025 16 ABG37023 12 ABD52438 16 |
| | ABG24031 16 ABG24029 16 ABF71465 12 ABF19812 16 ABF19810 14 ABE96824 16 |
| | ABE96822 16 ABE96820 16 ABE96818 13 ABE96816 16 YP_803548 1 YP_803551 5 |
| | ABI54258 5 ABI54255 1 ABK79791 2 ABK79788 2 ABK79785 2 ABK79782 3 ABK79779 7 |
| | ABK79776 9 ABK79773 3 ABI97391 3 ABE03771 4 ABE03767 6 |
| | Total Number of Accession Numbers: 54 |
| | Replikin Count: 3.4 |
| | Standard Deviation: +/1.4 |
| | Significance as compared to lowest mean Replikin Count: p < 0.001 |
| | Significance as compared to previous mean Replikin Count p > 0.10 |

### Example 16

### Repeat KHKK (SEQ ID NO: 1584) Signatures in Lung Cancer and Tobacco Mosaic Virus

[0497] Publicly available amino acid sequences at Accession Nos: Q9NS56 and 117607067, for non-small lung cancer and tobacco mosaic virus, respectively, were analyzed for Replikin Peak Genes. The inventors queried Accession No. Q9NS56 at www.pubmed.com. Accession No. Q9NS56 discloses the amino acid sequence of E3 ubiquitin-protein ligase Topors from human chromosome 9 of non-small cell lung cancer (SEQ ID NO: 1740). Upon analysis of SEQ ID NO: 1740, the inventors observed a Replikin Peak Gene having continuous Replikin sequences that begin at residue 880 (lysine) and continue through residue 897 (histidine).

[0498] The inventors isolated the RPG (SEQ ID NO: 1741) in silico. SEQ ID NO: 1741 was identified for diagnostic and therapeutic uses in, for example, an immunogenic compound and a therapeutic vaccine compound and as a predictive sequence for lethality. Fifty-two Replikin sequences (SEQ ID NOS: 1886-1937) were identified in the RPG of SEQ ID NO: 1741 for diagnostic, therapeutic and predictive uses as described herein. SEQ ID NOS: 1742-1747 were identified in the amino-terminal of the sequence disclosed in Accession No. Q9NS56 (SEQ ID NO: 1741), SEQ ID NOS: 1748-1780 were identified in the mid-molecule of the sequence, and SEQ ID NOS: 1781-1885 were identified in the carboxy-terminal of the sequence.

[0499] The Replikin Count of the amino acid sequence (SEQ ID NO: 1740) disclosed at Q9NS56 was 144 Replikin sequences in 1045 total amino acids for a Replikin Count of 13.8. The Replikin Count of the RPG (SEQ ID NO: 1741) was 52 Replikin sequences in 18 total amino acids for a Replikin Count of 289, the highest count yet observed.

[0500] Within the Replikin sequences identified in the RPG (SEQ ID NO: 1741), the KHKK signature was observed 57 times within 52 Replikin sequences. This high concentration of lethal signatures corresponds to the high lethality of non-small cell lung malignancies.

[0501] The inventors queried Accession No. 117607067 at www.pubmed.com. Accession No. 117607067 discloses the amino acid sequence of a hot pepper 26S proteasome subunit RPN7 induced by tobacco mosaic virus (SEQ ID NO: 1938). Upon analysis of SEQ ID NO: 1938, the inventors observed a Replikin Peak Gene having continuous Replikin sequences that begin at residue 91 (histidine) and continue through residue 175 (lysine).

[0502] The inventors isolated the RPG (SEQ ID NO: 1939) in silico. SEQ ID NO: 1939 was identified for diagnostic and therapeutic uses in, for example, an immunogenic compound and a therapeutic vaccine compound and as a predictive sequence for lethal outbreaks of tobacco mosaic virus. Fifty-four Replikin sequences (SEQ ID NOS: 1941-1994) were identified in the RPG of SEQ ID NO: 1939 for diagnostic, therapeutic and predictive uses as described herein.

[0503] SEQ ID NO: 1941 was identified in the amino-terminal of the sequence disclosed in Accession No. 117607067 (SEQ ID NO: 1938), SEQ ID NOS: 1942-1986 were identified in the mid-molecule of the sequence, and SEQ ID NOS: 1987-1994 were identified in the carboxy-terminal of the sequence. Each Replikin sequence was isolated in silico for diagnostic, therapeutic and predictive purposes as described herein including for immunogenic compositions and vaccines.

[0504] The Replikin Count of the amino acid sequence (SEQ ID NO: 1938) disclosed at Accession No. 117607067 was 55 Replikin sequences in 179 total amino acids for a Replikin Count of 30.7. The Replikin Count of the RPG (SEQ ID NO: 1939) was 54 Replikin sequences in 89 total amino acids for a Replikin Count of 61.

[0505] Within the Replikin sequences identified in 117607067 (SEQ ID NO: 1938), the KHKK (SEQ ID NO: 1584) signature was observed twenty times within 61 Replikin sequences. This high concentration of lethal signatures corresponds to the high lethality of tobacco mosaic virus and connects tobacco mosaic virus through KHKK (SEQ ID NO: 1584) signatures to lethal lung cancer.

[0506] As discussed above, repeating signatures such as a “KHKK” (SEQ ID NO: 1584) signature have been observed in Replikin sequences within RPGs of lethal malignancies, viruses and organisms. The KHKK (SEQ ID NO: 1584) signature has been observed eleven times within the RPG of the protozoa that causes most malaria, P. falciparum, 20 times within the RPG of tobacco mosaic virus, which caused exacerbated cell death induced by tobacco mosaic virus, and 57 times in non-small cell lung carcinoma within 52 Replikins observed within the 18 amino acid RPG identified in chromosome 9 of a non-small cell lung carcinoma. The presence of such a high number of KHKK (SEQ ID NO: 1584) signatures within the 18 amino acid RPG of the non-small cell lung carcinoma is explained by overlapping of the signatures. Overlapping of Replikin sequences and repeated signatures such as KHKK (SEQ ID NO: 1584) has now been associated with lethality, virulence and rapid replication. Together, these data indicate that a Replikin gene is quantitatively associated with lethal functions, and may be a mobile agent of lethality transferring between strains and species.

### Example 17

### Repeat KHKK (SEQ ID NO: 1584) Signatures in Malaria

[0507] The inventors queried Accession No. P13817 at www.pubmed.com. Accession No. P13817 discloses an amino acid sequence from Plasmodium falciparum. The inventors analyzed the amino acid sequence provided at P13817 (SEQ ID NO: 2043). Upon analysis of SEQ ID NO: 2043, the inventors observed a Replikin Peak Gene having continuous Replikin sequences that begin at residue 323 (histidine) and continue through residue 473 (lysine) (SEQ ID NO: 3659).

[0508] The inventors isolated the RPG (SEQ ID NO: 3659) in silico. SEQ ID NO: 3659 was identified for diagnostic and therapeutic uses in, for example, an immunogenic compound and a therapeutic vaccine compound and as a predictive sequence for lethal outbreaks of malaria. Two hundred and thirty-one Replikin sequences (SEQ ID NOS: 2312-2315 and 2317-2544) were identified in the RPG of SEQ ID NO: 3659 for diagnostic, therapeutic and predictive uses as described herein. Replikin sequences SEQ ID NOS: 2044-2077 were identified in the amino-terminal of the sequence of SEQ ID NO: 2043, Replikin sequences SEQ ID NOS: 2079-2080 were identified in the mid-molecule of the sequence, and Replikin sequence SEQ ID NOS: 2081-2315 were identified in the carboxy-terminal.

[0509] The Replikin Count of the whole sequence (SEQ ID NO: 2043) was 268 Replikin sequences in 473 total amino acids for a Replikin Count of 56.7. The Replikin Count of the RPG area (SEQ ID NO: 3659) was 231 Replikin sequences in 151 total amino acids for a Replikin Count of 153.

[0510] The inventors queried Accession No. A44396 at www.pubmed.com. Accession No. A44396 discloses an amino acid sequence from an ATP-ase-like molecule of P. falciparum isolated in 1993. The inventors analyzed the amino acid sequence provided at A44396 (SEQ ID NO: 2926). Upon analysis of SEQ ID NO: 2926, the inventors observed a Replikin Peak Gene having continuous Replikin sequences that begin at residue 1297 (histidine) and continue through residue 1333 (histidine).

[0511] The inventors isolated the RPG (SEQ ID NO: 3661) in silico. SEQ ID NO: 3661 was identified for diagnostic and therapeutic uses in, for example, an immunogenic compound and a therapeutic vaccine compound and as a predictive sequence for lethal outbreaks of malaria. Seventeen Replikin sequences (SEQ ID NOS: 3282-3285, 3287-3291, 3293, 3295, 3299-3300, 3302, 3304, 3306, 3308, 3310-3313 and 3663) were identified in the RPG of SEQ ID NO: 3661 for diagnostic, therapeutic and predictive uses as described herein. Replikin sequences SEQ ID NOS: 2546-2632 were identified in the amino-terminal of the sequence of SEQ ID NO: 2926, Replikin sequences SEQ ID NO: 2633-2720 were identified in the mid-molecule of the sequence, and SEQ ID NOS: 2721-2900 were identified in the carboxy-terminus.

[0512] The Replikin Count of the whole ATP-ase sequence (SEQ ID NO: 2926) was 355 Replikin sequences in 1984 total amino acids for a Replikin Count of 17.9. The Replikin Count of the RPG area (SEQ ID NO: 3661) was 15 Replikin sequences in 37 total amino acids for a Replikin Count of 41.

[0513] Eleven signature repeat KHKK (SEQ ID NO: 1584) sequences were noted in the Replikin sequences of the RPG. The eleven signature repeats, namely, SEQ ID NOS: 3286, 3292, 3294, 3296, 3298, 3662, 3301, 3303, 3305, 3307, and 3309 are respectfully found within noted Replikin sequences SEQ ID NOS: 3286, 3291, 3293, 3295, 3297, 3299, 3300, 3302, 3204, and 3206.

[0514] The presence of such a high number of KHKK (SEQ ID NO: 1584) signatures within the fifteen Replikin sequences in the 37 amino acid RPG of the P. falciparum is explained by overlapping of the signatures. Overlapping of Replikin sequences and repeated signatures such as KHKK (SEQ ID NO: 1584) has now been associated with lethality, virulence and rapid replication as in malaria, which has an exceptionally high rate of replication within its lifecycle.

### Example 18

### Laboratory Demonstration of Relationship of Replikin Count to Percent Mortality in Taura Syndrome Virus Infection in Shrimp

[0515] To test further the relationship of Replikins to virulence, the relationship of Replikin count of shrimp viruses to mortality in shrimp was examined in a controlled situation. Based on the hypothesis that the Replikin count of a virus is related to virulence of the virus and the percent mortality of the host, as developed from the evidence on H5N1 virus infections in humans, Applicants tested whether it would be possible to predict solely from the Replikin Count of the amino acid sequence of the whole genome what the order of virulence would be of four strains of the virus. Taura syndrome shrimp virus (TSV), which kills most host shrimp within a few days of infection, was chosen to be studied. The amino acid sequences of four strains of taura syndrome virus (Belize, Thailand, Hawaii, and Venezuela) were analyzed with the FluForecast® software of REPLIKINS LLC, Boston, Mass. and the results held in confidence until the laboratory challenge experiments with the virus were completed, then compared with the percent mortality produced by each strain.

[0516] In the laboratory, there was a significant linear correlation between the mortality rates of the host shrimp challenged with each of the four virus strains and the mortality rates predicted earlier by only the Replikin counts of each strain. These data support the conclusion that virus Replikin peptide concentration, in addition to predicting virus outbreaks, relates quantitatively to host mortality rate and to the increase in virulence over time observed.

[0517] A. Replikin Analysis

[0518] Visual Replikin analysis was performed on the sequence information for the taura syndrome virus isolates from Belize, Thailand, Hawaii, and Venezuela by applying the algorithm defining Replikins with computer access to protein and genomic sequences freely available on PubMed or other public databases. The specific defining algorithm follows: a Replikin is a peptide sequence in a protein or genome, 7 to 50 amino acids long having a terminal lysine and a terminal lysine or histidine, containing at least 2 lysine groups 6 to 10 amino acids apart, at least 1 histidine group, and at least 6% lysine. Overlapping Replikins are common and are counted separately. The quantitative correlations with rapid replication and epidemics and lethality require all components of the algorithm to be in place for each Replikin. Thus for example, if the length and lysine requirements are present but there is no histidine present, the peptide is not a Replikin. Automated Replikin analysis was performed with the FluForecast® software service of Replikins Ltd., Boston, Mass.

[0519] B. Identification of the Replikin Peak Gene

[0520] The Replikin count was used to identify that area of the genome which had the highest concentration of Replikins, and this area called the Replikin Peak Gene (RPG) area. The further two to eight-fold increase in the Replikin count of the RPG which occurred with outbreaks was further used to confirm the identity of this gene. The function of the gene was therefore used to identify it or isolate it “in silico”.

[0521] C. Shrimp Virus Laboratory Methods

[0522] At the Aquaculture Pathology Laboratory, Department of Veterinary Science and Microbiology, University of Arizona, Tucson Ariz., small juveniles of specific-pathogen-free Litopenaeus vannamei shrimp per tank, mean weight: 1.8 g, were fed minced TSV-infected tissues (infected separately with each of the 4 isolates originating from Belize, Thailand, Venezuela and Hawaii) for 3 days at 5% of their body weight. These shrimp were maintained with pelleted ration (Rangen 35%) for the following 12 days. Each challenge bioassay of a specific isolate was done in triplicate. During the bioassay period, all tanks were checked daily for dead or moribund shrimp. All mortalities were removed from the tank and frozen. One to three moribund shrimp from each isolate were preserved in Davidson's AFA fixative and processed for routine histology to confirm viral infection. For each isolate, six moribund shrimp were collected during the acute phase infection and total RNA was extracted from their gill tissues with a High Pure RNA tissue kit (Roche). The extracted RNA was analyzed for the presence of TSV by real-time RT-PCR. All tanks were outfitted with an acclimated biological filter and aeration, and were covered with plastic to contain aerosols. The average salinity of the water was 23 ppt and the water temperature was 28° C. The challenge study was terminated after 15 days with live animals counted as survivors.

[0523] D. Comparison of Virulence

[0524] First mortality was seen on day 2 after exposure to TSV in all 4 isolates. For Belize isolate, most (83%) of shrimp died by day 4 and had a 0% survival at day 11 (FIG. 14A, Table 26). For Thailand isolate, 63% mortalities occurred by day 4 and had 20% survivals at the end of 15-day bioassay (FIG. 14B, Table 26). For Hawaii isolate, mortalities increased starting at day 2 and reached to a peak at day 5; the cumulative survival is 22% at the end (FIG. 14C, Table 26). For Venezuela isolate, mortalities occurred slowly at days 2 and 3 with 22% of shrimp showed mortalities on day 4 and then mortalities were slowing down; there were 42% of shrimp survived in the end (FIG. 14D, Table 26). The time period for reaching 50% mortality caused by TSV infection for the isolate of Belize, Thailand, Hawaii and Venezuela were 2.8, 3.5, 4.5 and 7 days, respectively (Table 26).

[0525] FIG. 14 provides data for the cumulative survival of Litopenaeus vannamei challenged with TSV isolates per os with taura syndrome virus isolates from a: Belize; b: Thailand; c: Hawaii; d: Venezuela. The data from FIG. 14 is contained in Table 26 below.

TABLE 26
TSV Challenge

| | GenBank no. | Survival (%) | Day of 50% |
|---|---|---|---|
| TSV isolate | (ORF1) | (Mean) | mortality |
| Belize | AAT81157 | 0 | 2.8 |
| Thailand | AAY56363 | 20 | 3.5 |
| US-Hawaii | AAK72220 | 22 | 4.5 |
| Venezuela | ABB17263 | 42 | 7.0* |

*High variation was observed in Venezuela's triplicate tanks, thus the Day of 50% mortality was determined by Kaplan-Meier survival analysis with the Statistix 8 program.

[0526] The correlation of the virulence observed for each of the TSV isolates with the predicted virulence by Replikin Count alone are shown in FIG. 15. FIG. 15A provides data comparing Replikin Counts of the four isolates with the mean day of 50% mortality as gathered in blind studies. FIG. 15B provides data comparing Replikin Counts of the four isolates with mean cumulative mortality as gathered in blind studies. The linear quantitative relationship between the predicted and experimental values is evident. Table 27 below provides the histological data that was gathered for the moribund shrimp to demonstrate TSV infection.

TABLE 27
Histology

| UAZ ID# | TSV Isolate | Days after exposure | TSV lesions¹ | LOS² |
|---|---|---|---|---|
| O6-407J/1 | Belize | 3 | G4 | G4 |
| 06-407F/1 | Thailand | 3 | G4 | G2 |
| 06-407D/1 | Thailand | 4 | G4 | G3 |
| 06-407E/1 | Thailand | 4 | G3 | G2 |
| 06-407A/1 | Hawaii | 4 | G2 | G3 |
| 06-407C/1 | Hawaii | 4 | G2 | G4 |
| 06-407H/1 | Venezuela | 4 | G4 | G2 |

Severity grade:
G1: sign of infection;
G2: moderate signs of infection;
G3: moderate to high signs of infection;
G4: severe infection.
¹TSV lesions = Presence of TSV pathognomonic lesions in the gills, mouth, stomach, intecumental cuticular epithelium, and appendages.
²LOS = presence of lymphoid organ spheroids within the lymphoid organ.

[0527] Belize TSV: Acute lesions of diagnostic TSV infection were found in one representative shrimp sample (06-407J/1) at a severity grade of G4. Nuclear pyknosis and karyorrhexis were observed in the cuticular epithelium of the general body surface, appendages, gills, stomach and esophagus. Lymphoid organ spheroids were also found at severity grade G4. Thailand TSV: Severe (G4) TSV infection was detected in 2 out 3 shrimp (06-407D/1, F/1), another shrimp (06-407E/1) showed a moderate to high grade (G3) of infection. Lymphoid organ spheroids were found at severities of G2 and G3. Hawaii TSV: Moderate level (G2) of TSV infection was detected in 2 shrimp (06-407A/1, C/1) collected at day 4. Lymphoid organ spheroids were found at severities of G3 and G4. Venezuela TSV: Severe (G4) TSV infection was detected in one representative shrimp (06-407H/1) sampled at day 4. Lymphoid organ spheroids were found at severity of G2.

[0528] The real-time TSV RT-PCR assay was designed specifically for Hawaii TSV and thus a high level (10⁷ copies/μl RNA) of TSV was detected in the Hawaii-TSV challenged shrimp Table 28). The target sequence in 3 other isolates has 2 mis-matched nucleotides with the primers/TaqMan probe. Thus, there is 10 times less quantity of TSV (10⁶ copies/μl RNA) detected in Belize and Thailand samples. The Venezuela samples were detected with 100-100,000 times less: 10²-10⁵ copies/μl RNA; this may be due to both the effect of mismatches and a lower level of infection in the samples analyzed. Nevertheless, all 24 samples (6 from each isolates) were all positive for TSV infection. This confirms that the mortalities observed from bioassays are from TSV infection. The real-time TSV RT-PCR assay data is found below in the Table 28.

TABLE 28
PCR

| TSV isolate | Mean (Range) TSV copies/:1 RNA |
|---|---|
| Belize | 2.7 × 10⁶ (4.8 × 10⁵ − 4.4 × 10⁶) |
| Thailand | 2.7 × 10⁶ (4.3 × 10⁵ − 7.5 × 10⁶) |
| Hawaii | 5.2 × 10⁷ (2.3 × 10⁷ − 7.5 × 10⁷) |
| Venezuela | 6.5 × 10⁵ (6.5 × 10² − 2.0 × 10⁵) |

[0529] E. Laboratory Mortality Results Correlated With Replikin Counts

[0530] Virulence of 4 TSV isolates (Hawaii, Belize, Thailand and Venezuela) was compared through a per os laboratory infection in juvenile Litopenaeus vannamei (Kona stock, Oceanic Institute, Hawaii). The results showed that the Belize isolate is the most virulent, Thailand is the second, followed by the Hawaii isolate, and the Venezuela isolate is the least virulent. This is based on the analyses of cumulative survivals at the end of the bioassay (p<0.047) and the time when 50% mortality was occurred (p<0.001). That the mortality of the shrimp was caused by TSV infection was confirmed by positive reactions in RT-PCR detection and by the appearance of characteristic lesions observed in histological analysis

[0531] F. Laboratory Mortality Results Correlated With Replikin Counts

[0532] Experimentally, Replikin Counts alone prospectively correctly predicted: (1) blind in controlled experiments in the laboratory, the order of lethality in shrimp of four strains of taura syndrome virus (FIGS. 15A and B); (2) an increasing H5N1 percent mortality in humans (FIG. 4); and (3) the host (FIG. 5); and (4) the country in which the latter would occur, Indonesia (FIG. 6). For both H5N1 influenza in human hosts, and taura syndrome virus infection in shrimp hosts, evidence in this study demonstrates the quantitative relationship of the virus Replikin Count to the mortality rate in the host. The ability to predict blind is of course one of the more definitive proofs of a relationship; the demonstration of a quantitative linear relationship is even more definitive. Thus, the concentration of a class of specific virus peptides, Replikins, has here been quantitatively correlated with the percent mortality these viruses produce in their respective hosts, namely invertebrate crustacean (shrimp) and vertebrates (humans). To our knowledge, no quantitative correlation of virus structure and host lethality has been reported previously.

### Example 19

### Increased Host Resistance to Taura Syndrome Virus by Administration of Synthetic Replikins

[0533] Shrimp cultured using the Challenge Methods described in Example 18 above were exposed in a first experiment for two weeks to synthetic Replikins per os mixed in their feed. The Replikins were peptides specific to Replikin sequences present in the TSV Hawaii strain isolate with which the shrimp were challenged.

[0534] In the experiment, mortality was reduced by 50% compared to a control group. The control group was given feed not containing synthetic Replikin sequences. A second control group was fed Replikin sequences synthesized with the covalent binding of additional amino acids to the same synthetic Replikins fed to the shrimp. The covalently “blocked” Replikins did not increase shrimp resistance to the virus in the same experiment demonstrating that the increase in host resistance was specific to the Replikin peptide structure.

[0535] Because little is known about the details of the immune system of the shrimp (shrimp appear not to produce antibodies), the phenomenon of “resistance” to infection appears to be based in a “primitive immune system” perhaps similar to the “toll receptor” and related systems. Thus the term “increased resistance” is used for the observed phenomenon and Replikin feed is used rather than “vaccine” for the administered substance which increases resistance.

[0536] The surviving shrimp of the first challenge were then set up in a fresh culture, fed for an additional two weeks with feed containing Replikin sequences, then again challenged with the Hawaii strain of taura syndrome virus. The Replikin sequence supplemented feed was maintained while the survivors were again challenged repeatedly by the same virus, in repeated cycles, until 100% of the shrimp survived the TSV challenge.

### Example 20

### Calculation of RPG in Viral Hemorrhagic Disease in Fish

[0537] The inventors queried Accession No. ABQ42711 at www.pubmed.com. Accession No. ABQ42711 discloses an amino acid sequence from a glycoprotein in hemorrhagic septicemia virus. Hemorrhagic septicemia virus is a cause of hemorrhagic disease in fish. The inventors analyzed the amino acid sequence provided at ABQ42711 (SEQ ID NO: 3787). Upon analysis, the inventors observed a Replikin Peak Gene having continuous Replikin sequences that begin at residue 81 (histidine) and continue through residue 204 (histidine).

[0538] The inventors isolated the RPG in silico for diagnostic and therapeutic uses in, for example, an immunogenic compound and a therapeutic vaccine compound and as a predictive sequence for lethal outbreaks of hemorrhagic disease in fish. Thirty-six Replikin sequences (SEQ ID NOS: 3788-3823) were identified in SEQ ID NO: 3787 for diagnostic, therapeutic and predictive uses as described herein. Replikin sequences SEQ ID NOS: 3788-3795 were identified in the amino-terminal, Replikin sequences SEQ ID NOS: 3796-3815 were identified in the mid-molecule of the sequence, and Replikin sequences 3816-3823 were identified in the carboxy-terminal. All were isolated for diagnostic, therapeutic and predictive purposes.

[0539] The Replikin Count of the whole sequence (SEQ ID NO: 3787) was 36 Replikin sequences in 222 total amino acids for a Replikin Count of 16. The highest Replikin Count of an identified RPG area in hemorrhagic septicemia virus was 73 Replikin sequences in 123 total amino acids for a Replikin Count of 59.

[0540] The inventors queried publicly available sequences from isolates of hemorrhagic viral disease syndrome in fish from 1990 through 2007. The following table provides the accession numbers queried. The highest Replikin Count of an identified RPG area in hemorrhagic septicemia virus was 73 Replikin sequences in 123 total amino acids for a Replikin Count of 59.

[0541] The inventors queried all sequences for hemorrhagic viral disease in fish publicly available at www.pubmed.com between 1990 and 2007 Using FluForecast® (Replikins LLC, Boston, Mass.), the inventors determined the mean Replikin Count in each year from 1990-2007. The data is provided in Table 29. The table does not included years in which no data was available.

TABLE 29
Hemorrhagis septicemia Mean Replikin Counts

| | | | Mean | | |
|---|---|---|---|---|---|
| | | No. of | Replikin | | |
| | | Isolates per | Count | | |
| Year | PubMed Accession Number-Replikin Count | year | per year | S.D. | Signficance |
| 1990 | BAA00591 3 CAA00881 29 CAA52082 33 | 9 | 5.0 | 2.4 | low p < .001 |
| | CAA52081 33 CAA52080 33 CAA52079 33 | | | | |
| | CAA52078 33 CAA52077 33 P24378 3 | | | | |
| 1991 | CAA41859 29 CAA41858 29 CAA01751 4 | 6 | 3.5 | 2.5 | low p < .001, |
| | CAA41930 4 P27663 2 P27662 29 | | | | prev p < .20 |
| 1992 | CAA46926 33 P27371 4 | 2 | 3.7 | 3.9 | low p < .10, |
| | | | | | prev p > .50 |
| 1993 | AAB26115 33 AAT01207 48 AAT01206 48 | 64 | 9.4 | 0.4 | low p < .001, |
| | AAT01205 48 AAT01204 48 AAT01203 48 | | | | prev p < .04 |
| | AAT01202 48 AAT01201 | | | | |
| | 48 AAT01200 48 AAT01199 48 AAT01198 48 | | | | |
| | AAT01197 48 AAT01196 48 AAT01195 48 | | | | |
| | AAT01194 48 AAT01193 | | | | |
| | 48 AAT01192 48 AAT01191 48 AAT01190 48 | | | | |
| | AAT01189 48 AAT01188 48 AAT01187 48 | | | | |
| | AAT01186 48 AAT01185 | | | | |
| | 48 AAT01184 48 AAT01183 48 AAT01182 48 | | | | |
| | AAT01181 48 AAT01180 48 AAT01179 48 | | | | |
| | AAT01178 48 AAT01177 | | | | |
| | 48 AAT01176 48 AAT01175 48 AAT01174 48 | | | | |
| | AAT01173 48 AAT01172 48 AAT01171 48 | | | | |
| | AAT01170 48 AAT01169 | | | | |
| | 48 AAT01168 48 AAT01167 48 AAT01166 48 | | | | |
| | AAT01165 48 AAT01164 48 AAT01163 48 | | | | |
| | AAT01162 48 AAT01161 | | | | |
| | 48 AAT01160 48 AAT01159 48 AAT01158 48 | | | | |
| | AAT01157 48 AAT01156 48 AAT01155 48 | | | | |
| | AAT01154 48 AAT01153 | | | | |
| | 48 AAT01152 48 AAT01151 48 AAT01150 48 | | | | |
| | AAT01149 48 AAT01148 48 AAT01147 48 | | | | |
| | AAT01146 48 AAT01145 48 | | | | |
| 1994 | | | | | |
| 1995 | AAB88231 33 AAB88230 38 AAB8829 41 | 5 | 5.9 | 2.7 | low p < .001, |
| | AAB88232 30 Q96460 6 | | | | prev p < .002 |
| 1997 | AAC24962 3 CAB59222 53 CAB59221 53 | 46 | 8.3 | 4.4 | low p < .001, |
| | CAB07737 53 CAB59220 53 CAB59219 53 | | | | prev p < .05 |
| | CAB59218 53 CAB59217 | | | | |
| | 52 CAB59216 52 CAB59215 52 CAB59214 52 | | | | |
| | CAB59213 52 CAB59212 52 AAB88228 52 | | | | |
| | AAB88227 | | | | |
| | 30 AAB88226 29 AAB88225 30 AAB88224 30 | | | | |
| | AAB88223 23 AAB88222 30 CAB07754 15 | | | | |
| | CAB07753 | | | | |
| | 17 CAB07752 14 CAB07751 7 CAB07750 14 | | | | |
| | CAB07749 14 CAB07748 14 CAB07747 11 | | | | |
| | CAB07746 | | | | |
| | 14 CAB07745 14 CAB07744 14 CAB07743 15 | | | | |
| | CAB07742 15 CAB07741 7 CAB07740 15 | | | | |
| | CAB07739 | | | | |
| | 14 CAB07738 14 CAB07736 11 CAB07734 20 | | | | |
| | CAB07733 11 CAB07732 14 CAB07731 15 | | | | |
| | CAB07730 | | | | |
| | 3 CAB07729 14 CAB07728 14 CAB07727 15 | | | | |
| 1998 | NP_049550 55 NP_049549 55 NP_049548 55 | 20 | 2.9 | 0.6 | low p < .001, |
| | NP_049547 55 NP_049546 55 NP_049545 55 | | | | prev p < .001 |
| | CAB57984 | | | | |
| | 1 CAB44726 55 CAB44725 55 CAB44724 55 | | | | |
| | CAB44723 55 CAB44722 55 CAB44721 55 | | | | |
| | CAB40833 | | | | |
| | 66 CAB40832 66 CAB40831 66 CAB40830 66 | | | | |
| | CAB40829 66 CAB40828 66 CAA08837 58 | | | | |
| 1999 | AAF04486 57 AAF04485 57 AAF04484 57 | 13 | 2.9 | 0.3 | low p < .001, |
| | AAF04483 57 AAF04482 57 AAF04481 57 | | | | prev p > .50 |
| | AAF04480 53 | | | | |
| | AAF04479 53 AAF04478 53 AAF04477 53 | | | | |
| | AAF04476 53 AAF04475 53 BAC29401 14 | | | | |
| 2000 | | | | | |
| 2001 | BAB70674 15 BAB70673 16 BAB70672 16 | 7 | 7.4 | 0.7 | low p < .001, |
| | BAB70671 16 AAL83805 32 AAL83804 35 | | | | prev p < .001 |
| | AAL83803 40 | | | | |
| 2002 | AAN85721 30 CAD31945 13 CAD31944 7 | 7 | 8.1 | 2.5 | low p < .001, |
| | CAD31943 7 CAD31941 7 CAD31924 7 | | | | prev p > .50 |
| | CAD31923 7 | | | | |
| 2003 | ABF17852 20 ABF17851 20 ABF17850 20 | 13 | 8.1 | 3.6 | low p < .001, |
| | ABF17849 20 ABF17848 20 ABF17847 20 | | | | prev p > .50 |
| | ABF17846 | | | | |
| | 20 ABF17845 20 NP_997523 30 NP_997978 41 | | | | |
| | NP_997977 21 NP_001013287 33 NP_891987 29 | | | | |
| 2004 | AAU12246 26 AAU12245 26 AAU12244 26 | 34 | 10.6 | 3.2 | low p < .001, |
| | AAU12243 26 AAU12242 26 AAU12241 26 | | | | prev p < .02 |
| | AAU12240 | | | | |
| | 26 AAU12239 26 AAU12238 26 AAU12237 26 | | | | |
| | AAU12236 26 AAU12235 26 AAU12234 26 | | | | |
| | AAU12233 | | | | |
| | 26 AAU12232 26 AAU12231 26 AAU12230 26 | | | | |
| | AAU12229 26 AAU12228 26 AAU12227 26 | | | | |
| | AAU12226 | | | | |
| | 26 AAU12225 26 AAU12224 26 AAU12223 26 | | | | |
| | AAU12222 26 AAU12221 26 AAU12220 26 | | | | |
| | AAU12219 | | | | |
| | 26 BAD72126 42 BAD72124 30 BAD72123 8 | | | | |
| | BAD72122 16 BAD72121 4 NP_998029 8 | | | | |
| 2005 | CAJ31050 28 CAJ31049 28 CAJ31048 28 | 62 | 5.6 | 0.7 | low p < .001, |
| | CAJ31047 28 CAJ31046 28 CAJ31045 28 | | | | prev p < .001 |
| | CAJ31044 28 CAJ31043 | | | | |
| | 28 CAJ31042 28 CAJ31041 28 CAJ31040 28 | | | | |
| | CAJ31039 28 CAJ31038 28 CAJ31037 28 | | | | |
| | CAJ31036 28 CAJ31035 | | | | |
| | 28 CAJ31034 28 CAJ31033 28 CAJ31032 28 | | | | |
| | CAJ31031 28 CAJ31030 28 CAJ31029 28 | | | | |
| | CAJ31028 28 CAJ31027 | | | | |
| | 28 CAJ31026 28 CAJ31025 28 CAJ31024 28 | | | | |
| | CAJ31023 28 CAJ31022 28 CAJ31021 28 | | | | |
| | CAJ31020 28 CAJ31019 | | | | |
| | 28 CAJ31018 21 CAJ31017 21 CAJ31016 28 | | | | |
| | CAJ31015 28 CAJ31014 28 CAJ31013 28 | | | | |
| | CAJ31012 28 CAJ31011 | | | | |
| | 28 CAJ31010 28 CAJ31009 28 CAJ31008 28 | | | | |
| | CAJ31007 28 CAJ31006 28 CAJ31005 28 | | | | |
| | CAJ31004 28 CAJ31003 | | | | |
| | 28 CAJ31002 28 CAJ31001 28 CAJ31000 28 | | | | |
| | CAJ30999 28 CAJ30998 28 CAJ30997 28 | | | | |
| | CAJ30996 28 CAJ30995 | | | | |
| | 28 CAJ30994 28 CAJ30993 28 CAJ30992 28 | | | | |
| | CAJ30991 28 BAE78962 17 BAE78961 16 | | | | |
| 2006 | ABN13930 16 ABN13929 16 ABN13928 16 | 16 | 7.8 | 2.8 | low p < .001, |
| | ABN13927 16 ABN13926 2 ABD96102 4 | | | | prev p < .002 |
| | ABD64588 47 ABD64587 | | | | |
| | 47 ABD64586 47 ABD64585 47 ABD64584 47 | | | | |
| | ABD64583 47 ABD64582 47 ABD64581 47 | | | | |
| | ABD64580 | | | | |
| | 47 ABD64579 47 | | | | |
| 2007 | ABQ42711 36 | 1 | 16.2 | 0.0 | prev p < .001 |

What is claimed is:

1. A method of identifying a first virus, first organism or first malignancy with a higher lethality than at least one second virus of the same species as the first virus, second organism of the same species as the first organism, or second malignancy of the same species as the first malignancy, which method comprises comparing the Replikin Count of the Replikin Peak Gene of the first virus, first organism or first malignancy to the Replikin Count of the Replikin Peak Gene of at least one second virus, second organism, or second malignancy to determine that the virus, organism or malignancy with the higher Replikin Count is the more lethal.

2. The method of claim 1 wherein said first malignancy is a lung malignancy, a brain malignancy, a breast malignancy, an ovarian malignancy, or a lymph malignancy.

3. The method of claim 2 wherein said first malignancy is a non-small cell lung carcinoma.

4. The method of claim 1 wherein said first organism is a Mycobacterium tuberculosis, Mycobacterium mucogenicum, Staphylococcus aureus, or Plasmodium falciparum.

5. The method of claim 1 wherein said first virus is influenza virus, foot and mouth disease virus, west nile virus, porcine respiratory and reproductive syndrome virus, porcine circovirus, white spot syndrome virus, taura syndrome virus, coronavirus, ebola virus, gemini leaf curl virus, hemorrhagic septicemia virus, or tobacco mosaic virus.

6. The method of claim 5 wherein said first virus is Influenza A virus strain H1N1, H2N2, H3N2, H5N1, or H3N8.

7. An isolated or synthesized Replikin Peak Gene of a virus, organism or malignancy wherein said Replikin Peak Gene is identified as the portion of the genome, protein or protein fragment of a virion of the virus, a cell of the organism or a malignant cell of the malignancy consisting of the highest number of continuous Replikin sequences per 100 amino acids as compared to other portions of the genome, protein or protein fragment of the virion of the virus, the cell of the organism or the malignant cell of the malignancy.

8. The isolated or synthesized Replikin Peak Gene of claim 7 wherein the Replikin Peak Gene is the portion of a protein or protein fragment consisting of the highest number of continuous Replikin sequences per 100 amino acids as compared to all other proteins or protein fragments in the virion of the virus, in the cell of the organism or in the malignant cell of the malignancy.

9. The isolated or synthesized Replikin Peak Gene of claim 7 wherein said Replikin Peak Gene is isolated from a lung malignancy, a brain malignancy, a breast malignancy, an ovarian malignancy, or a lymph malignancy.

10. The isolated or synthesized Replikin Peak Gene of claim 9 wherein said Replikin Peak Gene is isolated from a non-small cell lung carcinoma or glioblastoma multiforme.

11. The isolated or synthesized Replikin Peak Gene of claim 7 wherein said Replikin Peak Gene is isolated from Mycobacterium tuberculosis, Mycobacterium mucogenicum, Staphylococcus aureus, or Plasmodium falciparum.

12. The isolated or synthesized Replikin Peak Gene of claim 7 wherein said Replikin Peak Gene is isolated from influenza virus, foot and mouth disease virus, west nile virus, porcine reproductive and respiratory syndrome virus, porcine circovirus, white spot syndrome virus, taura syndrome virus, coronavirus, ebola virus, gemini leaf curl virus, hemorrhagic septicemia virus, or tobacco mosaic virus.

13. The isolated or synthesized Replikin Peak Gene of claim 12 wherein the influenza virus is an Influenza A virus.

14. The isolated or synthesized Replikin Peak Gene of claim 13 wherein said Influenza A virus is H1N1, H2N2, H3N2, H5N1 or H3N8.

15. The isolated or synthesized Replikin Peak Gene of claim 13 wherein said Replikin Peak Gene is isolated from the pB1 gene area of an influenza virus.

16. The isolated or synthesized Replikin Peak Gene of claim 12 wherein said virus is a foot and mouth disease virus.

17. The isolated or synthesized Replikin Peak Gene of claim 16 wherein said Replikin Peak Gene is identified within the VP1 gene of said foot and mouth disease virus.

18. The isolated or synthesized Replikin Peak Gene of claim 12 wherein said virus is west nile virus.

19. The isolated or synthesized Replikin Peak Gene of claim 18 wherein said Replikin Peak Gene is isolated from the envelope protein of said west nile virus.

20. The isolated or synthesized Replikin Peak Gene of claim 12 wherein said virus is porcine respiratory and reproductive syndrome virus.

21. The isolated or synthesized Replikin Peak Gene of claim 20 wherein said Replikin Peak Gene is isolated from a nucleocapsid protein of porcine respiratory and reproductive syndrome virus.

22. The isolated or synthesized Replikin Peak Gene of claim 12 wherein said virus is porcine circovirus.

23. The isolated or synthesized Replikin Peak Gene of claim 22 wherein said Replikin Peak Gene is isolated from a replicase protein of porcine circovirus.

24. The isolated or synthesized Replikin Peak Gene of claim 12 wherein said virus is white spot syndrome virus.

25. The isolated or synthesized Replikin Peak Gene of claim 24 wherein said Replikin Peak Gene is isolated from a ribonucleotide reductase protein of white spot syndrome virus.

26. The isolated or synthesized Replikin Peak Gene of claim 12 wherein said virus is tobacco mosaic virus.

27. The isolated or synthesized Replikin Peak Gene of claim 12 wherein said virus is hemorrhagic septicemia virus.

28. The isolated or synthesized Replikin Peak Gene of claim 27 wherein said Replikin Peak Gene is isolated from a glycoprotein in hemorrhagic septicemia virus.

29. The isolated or synthesized Replikin Peak Gene of claim 7 wherein said Replikin Peak Gene comprises a sequence of SEQ ID NO: 1741, SEQ ID NO: 3664, SEQ ID NO: 3660, SEQ ID NO: 3665, SEQ ID NO: 1996, SEQ ID NO: 1665, SEQ ID NO: 1684, SEQ ID NO: 1701, SEQ ID NO: 546, SEQ ID NO: 124, SEQ ID NO: 130, SEQ ID NO: 311, SEQ ID NOS: 341-344, SEQ ID NO: 286, SEQ ID NO: 287, SEQ ID NO: 288, SEQ ID NO: 289, SEQ ID NO: 290, SEQ ID NOS: 233-238, SEQ ID NO: 415, SEQ ID NO: 421, SEQ ID NO: 438, SEQ ID NO: 451, SEQ ID NO: 462, SEQ ID NO: 498, SEQ ID NO: 669, SEQ ID NO: 1168, SEQ ID NO: 1531, SEQ ID NO: 1548, positions 81-204 of SEQ ID NO: 3787, or SEQ ID NO: 1939.

30. An immunogenic composition comprising the isolated or synthesized Replikin Peak Gene of claim 7.

31. The immunogenic composition comprising a Replikin sequence isolated from a Replikin Peak Gene of claim 7 wherein said Replikin sequence is SEQ ID NOS: 2902-2925, SEQ ID NOS: 2312-2544, SEQ ID NOS: 2701-2711, SEQ ID NOS: 2713-2718, SEQ ID NOS: 3282-3285, 3287-3291, 3293, 3295, 3297, 3299, 3300, 3302, 3304, 3306, and 3308, SEQ ID NOS: 1685-1691, SEQ ID NOS: 1702-1717, SEQ ID NO: 106, SEQ ID NO: 112, SEQ ID NO: 113, SEQ ID NOS: 125-129, SEQ ID NOS: 131-156, SEQ ID NOS: 233-244, SEQ ID NOS: 286-290, SEQ ID NOS: 312-323, SEQ ID NOS: 354-366, SEQ ID NOS: 368-380, SEQ ID NOS: 383-393, SEQ ID NOS: 395-401, SEQ ID NOS: 403-414, SEQ ID NOS: 291-307, SEQ ID NOS: 308-310, SEQ ID NOS: 324-327, SEQ ID NOS: 328-340, SEQ ID NOS: 416-419, SEQ ID NOS: 422-437, SEQ ID NOS: 440-445, SEQ ID NOS: 452-457, SEQ ID NOS: 464-476, SEQ ID NOS: 482-484 and SEQ ID NOS: 487-492, SEQ ID NOS: 547-562. SEQ ID NOS: 663-667, SEQ ID NOS: 670-1166, SEQ ID NOS: 1169-1529, SEQ ID NOS: 1532-1542, SEQ ID NO: 1548, positions 81-204 of SEQ ID NO: 3787, or SEQ ID NOS 1637-1663.

32. A computer readable medium having stored thereon instructions which, when executed, cause the processor to perform a method for identifying a Replikin Peak Gene of a virus, organism or malignancy comprising identifying, within amino acid sequences or nucleic acid sequences that encode amino acid sequences of said virus, organism or malignancy, the portion of the genome, or protein or protein fragment of said virus, said organism or said malignancy consisting of the highest number of continuous Replikin sequences per 100 amino acids as compared to other portions of the genome, or protein or protein fragment of the virus, organism or malignancy.

33. The computer readable medium of claim 32 further comprising instructions which, when executed, cause the processor to perform a method for predicting an increase in lethality or virulence of said virus, organism or malignancy that comprises said identified Replikin Peak Gene or an outbreak of said virus or organism that comprises said identified Replikin Peak Gene comprising:
(1) determining that the Replikin Count of said Replikin Peak Gene of claim 32 or that the Replikin Count of a protein or gene area comprising said Replikin Peak Gene of claim 32 is higher than another Replikin Peak Gene or a protein or gene area comprising said other Replikin Peak Gene identified within the genome or within a protein or protein fragment of at least one other virus of the same species as said virus, at least one other organism of the same species as said organism or at least one other malignancy of the same type as said malignancy wherein said other virus, said other organism or said other malignancy is isolated at an earlier time point than said virus, said organism or said malignancy, and
(2) predicting an increase in lethality or virulence of said virus, organism or malignancy or predicting an outbreak of said virus or organsism.

34. A method of predicting the strain, the host or the geographic region of an outbreak or increase in lethality or virulence of a virus or organism comprising
(1) identifying a Replikin Peak Gene or a protein or gene area comprising a Replikin Peak Gene within the genome of a first virus or organism of a first strain, from a first host, or isolated from a first geographic region or within a protein or protein fragment of the first virus or organism that has a higher Replikin Count than a Replikin Peak Gene or protein or gene area comprising a Replikin Peak Gene identified within the genome or within a protein or protein fragment of at least one second virus of the same species as the first virus or at least one second organism of the same species as the first organism wherein said first virus or said first organism is isolated at a later time point than said first virus or said first organism and is the same strain, from the same or another host or isolated from the same or another geographic region as the first virus or first organism, and
(2) predicting an outbreak or an increase in lethality or virulence of said first strain, in said first host, or within said first geographic region of said first virus or organism.

35. The method of claim 34 wherein said protein or gene area comprising said Replikin Peak Gene within the genome of a first virus or organism is identified as having a higher Replikin Count than said protein or gene area comprising a Replikin Peak Gene identified within the genome or within a protein or protein fragment of said at least one second virus or organism.

36. The method of claim 34 wherein said first virus or said first organism is isolated at least six months to three years later than said second organism or said second virus.

37. The method of claim 34 wherein said first organism or said first virus is Mycobacterium tuberculosis, Mycobacterium mucogenicum, Staphylococcus aureus, and Plasmodium falciparum, influenza virus, foot and mouth disease virus, west nile virus, porcine reproductive and respiratory syndrome virus, porcine circovirus, white spot syndrome virus, taura syndrome virus, coronavirus, ebola virus, gemini leaf curl virus in tomato plants, hemorrhagic septicemia virus in fish, or tobacco mosaic virus.

38. The method of claim 37 wherein said Staphylococcus aureus is methicillin-resistant.

39. The method of claim 37 wherein said influenza virus is a strain of Influenza A virus.

40. The method of claim 39 wherein said Influenza A virus is H1N1, H2N2, H3N2, H5N1 or H3N8.

41. The method of claim 39 wherein said protein or gene area comprising said Replikin Peak Gene is the pB1 gene area of the influenza virus.

42. The method of claim 37 wherein said protein or gene area is a nucleocapsid protein of said porcine respiratory and reproductive syndrome virus.

43. The method of claim 37 wherein said protein or gene area is a VP1 protein of said foot and mouth disease virus.

44. The method of claim 37 wherein said protein or gene area is an envelope protein of said west nile virus.

45. The method of claim 37 wherein said protein or gene area is a nucleocapsid protein of said porcine reproductive and respiratory syndrome virus.

46. The method of claim 37 wherein said protein or gene area is an ATP-ase of said Plasmodium falciparum.

47. The method of claim 37 wherein said protein or gene area is a replicase protein of said porcine circovirus.

48. The method of claim 37 wherein said protein or gene area is a ribonucleotidease of said white spot syndrome virus.

49. A method of identifying a first virus, organism or malignancy associated with higher lethality, higher virulence or more rapid replication than a second virus of the same species as the first virus, a second organism of the same species as the first organism or a second malignancy of the same type as the first malignancy comprising identifying a Replikin Peak Gene encoded within the genome of at least one virion of the first virus, or at least one cell of the first organism, or at least one malignant cell of the first malignancy, or within a protein or protein fragment of at least one virion of the first virus, or at least one cell of the first organism, or at least one malignant cell of the first malignancy that has a higher Replikin Count than a Replikin Peak Gene identified encoded within the genome of at least one virion of the second virus, or at least one cell of the second organism, or at least one malignant cell of the second malignancy or within a protein or protein fragment of at least one virion of the second virus, or at least one cell of the second organism, or at least one malignant cell of the second malignancy wherein said first virus, first organism or first malignancy has higher lethality, higher virulence or more rapid replication than said second virus, second organism or second malignancy, and wherein the Replikin Peak Gene is defined as a protein or protein fragment having the highest concentration of continuous Replikin sequences per 100 amino acids as compared to the remaining proteins or protein fragments in the same virion of the virus, the same cell of the organism, or the same malignant cell, or the portion of the genome encoding the protein or protein fragment.

50. A method of identifying a first virus, first organism or first malignancy with a higher lethality than at least one second virus of the same species as the first virus, second organism of the same species as the first organism or second malignancy of the same species as the first malignancy comprising comparing the Replikin Count of the whole genome of said virus, organism or malignancy to the Replikin Count of the whole genome of said at least one second virus, second organism, or second malignancy to determine that the virus, organism or malignancy with the higher Replikin Count is the more lethal.

51. The method of claim 50 wherein said first virus is a coronavirus, a foot and mouth disease virus, a white spot syndrome virus, a taura syndrome virus, a porcine circovirus, or an influenza virus.

52. The method of claim 50 wherein said first virus is an H5N1 strain of influenza virus.

53. A method for obtaining an isolated or synthesized Replikin Peak Gene of a virus, organism or malignancy for diagnosis, prevention or treatment of an infection of said virus or said organism or for diagnosis, prevention or treatment of said malignancy comprising:
(1) obtaining a plurality of isolates of virus of the same species, a plurality of organisms of the same species, or a plurality of malignancies of the same type;
(2) analyzing the protein sequences or protein sequence fragments of each individual isolate of the plurality of isolates of virus, a cell of each individual organism of the plurality of organisms, or a malignant cell of each individual malignancy of the plurality of malignancies for the presence and concentration of Replikin sequences;
(3) identifying the protein sequence or the protein sequence fragment having the highest concentration of continuous Replikin sequences in the malignant cell of each individual malignancy, the cell of each individual organism or each individual virus isolate;
(4) selecting the protein sequence or protein sequence fragment having the highest concentration of continuous Replikin sequences among the plurality of isolates of virus, the plurality of organisms, or the plurality of malignancies;
(5) identifying the amino acid sequence of the selected protein sequence or protein sequence fragment as the Replikin Peak Gene of the plurality of virus isolates, organisms or malignancies; and
(6) isolating or synthesizing the identified Replikin Peak Gene of at least one of the plurality of virus isolates, organisms or malignancies wherein the isolated or synthesized identified Replikin Peak Gene is useful for diagnosis, prevention or treatment of said infection of said virus or said organism or said malignancy.

54. An immunogenic composition comprising at least one isolated or synthesized Replikin Peak Gene of claim 53.

55. The immunogenic composition of claim 54 wherein said isolated or synthesized Replikin Peak Gene is isolated from an emerging strain of a virus or organism.

56. The immunogenic composition of claim 54 further comprising a pharmaceutically acceptable carrier.

57. A vaccine comprising at least one isolated or synthesized Replikin Peak Gene of claim 7.

58. The vaccine of claim 57 wherein said at least one isolated or synthesized Replikin Peak Gene is isolated from an emerging strain of virus or organism.

59. A vaccine of claim 57 comprising SEQ ID NO: 1741, SEQ ID NO: 3664, SEQ ID NO: 3660, SEQ ID NO: 3665, SEQ ID NO: 1996, SEQ ID NO: 1665, SEQ ID NO: 1684, SEQ ID NO: 1701, SEQ ID NO: 546, SEQ ID NO: 124, SEQ ID NO: 130, SEQ ID NO: 311, SEQ ID NOS: 341-344, SEQ ID NO: 286, SEQ ID NO: 287, SEQ ID NO: 288, SEQ ID NO: 289, SEQ ID NO: 290, SEQ ID NOS: 233-238, SEQ ID NO: 415, SEQ ID NO: 421, SEQ ID NO: 438, SEQ ID NO: 451, SEQ ID NO: 462, SEQ ID NO: 498, SEQ ID NO: 669, SEQ ID NO: 1168, SEQ ID NO: 1531, SEQ ID NO: 1548, positions 81-204 of SEQ ID NO: 3787, or SEQ ID NO: 1939.

60. The vaccine of claim 57 wherein said isolated or synthesized Replikin Peak Gene is isolated from a virus.

61. The vaccine of claim 60 wherein said isolated or synthesized-Replikin Peak Gene is isolated from influenza virus, foot and mouth disease virus, west nile virus, porcine reproductive and respiratory syndrome virus, porcine circovirus, white spot syndrome virus, taura syndrome virus, coronavirus, ebola virus, gemini leaf curl virus, hemorrhagic septicemia virus, or tobacco mosaic virus.

62. The vaccine of claim 61 wherein said isolated or synthesized Replikin Peak Gene is isolated from Influenza A.

63. The vaccine of claim 62 wherein said Influenza A is H1N1, H2N2, H3N2, H5N1 or H3N8.

64. The vaccine of claim 57 wherein said isolated or synthesized Replikin Peak Gene is isolated from an organism.

65. The vaccine of claim 64 wherein said isolated or synthesized Replikin Peak Gene is isolated from Mycobacterium tuberculosis, Mycobacterium mucogenicum, Staphylococcus aureus, or Plasmodium falciparum.

66. The vaccine of claim 65 wherein said Staphylococcus aureus is methicillin-resistant.

67. The vaccine of claim 57 wherein said isolated or synthesized Replikin Peak Gene is isolated from a malignancy.

68. The vaccine of claim 67 wherein said isolated or synthesized Replikin Peak Gene isolated is isolated from a lung malignancy, a brain malignancy, a breast malignancy or a lymph malignancy.

69. The vaccine of claim 68 wherein said isolated or synthesized Replikin Peak Gene is isolated from a non-small cell lung carcinoma.

70. The vaccine of claim 68 wherein said isolated or synthesized Replikin Peak Gene is isolated from glioblastoma multiforme.

71. An immunogenic composition comprising a Replikin Peak Gene of claim 29.

72. The immunogenic composition of claim 71 further comprising a pharmaceutically acceptable carrier.

73. An isolated or synthesized Replikin sequence isolated from a protein or protein fragment of the Replikin Peak Gene of claim 7 or isolated from a protein comprising the Replikin Peak Gene of claim 7.

74. The Replikin sequence of claim 73 wherein said Replikin Peak Gene is isolated from Mycobacterium tuberculosis, Mycobacterium mucogenicum, Staphylococcus aureus, or a Plasmodium falciparum.

75. The Replikin sequence of claim 74 wherein said Replikin Peak Gene is isolated from Mycobacterium mucogenicum.

76. The Replikin sequence of claim 75 wherein said Replikin sequence is SEQ ID NOS: 2902-2925.

77. The Replikin sequence of claim 74 wherein said Replikin Peak Gene is isolated from Plasmodium falciparum.

78. The Replikin sequence of claim 77 wherein said Replikin Peak Gene is one of SEQ ID NOS: 2312-2544, SEQ ID NOS: 2701-2711, SEQ ID NOS: 2713-2718, SEQ ID NOS: 3282-3285, 3287-3291, 3293, 3295, 3297, 3299, 3300, 3302, 3304, 3306, or SEQ ID NO: 3308.

79. The Replikin sequence of claim 73 wherein said Replikin Peak Gene is isolated from influenza virus, foot and mouth disease virus, west nile virus, porcine reproductive and respiratory syndrome virus, porcine circovirus, white spot syndrome virus, taura syndrome virus, coronavirus, ebola virus, gemini leaf curl virus, hemorrhagic septicemia virus, or tobacco mosaic virus.

80. The Replikin sequence of claim 79 wherein said influenza virus is Influenza A virus.

81. The Replikin sequence of claim 80 wherein said Influenza A virus is HIN1, H2N2, H3N2, H5N1 or H3N8.

82. The Replikin sequence of claim 81 wherein said Influenza A virus is H5N1 and the Replikin sequence is one of SEQ ID NOS: 1685-1691, SEQ ID NOS: 1702-1716 or SEQ ID NO: 1717.

83. The Replikin sequence of claim 81 wherein said Influenza A virus is H3N8 and the Replikin sequence is one of SEQ ID NOS: 547-561 or SEQ ID NO: 562.

84. The Replikin sequence of claim 79 wherein said Replikin Peak Gene is isolated from foot and mouth disease virus.

85. The Replikin sequence of claim 84 wherein said Replikin sequence is one of SEQ ID NO: 106, SEQ ID NO: 112, SEQ ID NO: 113, SEQ ID NOS: 125-129, SEQ ID NOS: 131-155 or SEQ ID NO: 156.

86. The Replikin sequence of claim 79 wherein said Replikin Peak Gene is isolated from west nile virus.

87. The Replikin sequence of claim 86 wherein said Replikin sequence is one of SEQ ID NOS: 233-243 or SEQ ID NO: 244.

88. The Replikin sequence of claim 79 wherein said Replikin Peak Gene is isolated from PRRSV.

89. The Replikin sequence of claim 88 wherein said Replikin sequence is one of SEQ ID NOS: 286-290, SEQ ID NOS: 312-323, SEQ ID NOS: 354-366, SEQ ID NOS: 368-380, SEQ ID NOS: 383-393, SEQ ID NOS: 395-401, SEQ ID NOS: 403-413 or SEQ ID NO: 414.

90. The Replikin sequence of claim 79 wherein said Replikin Peak Gene is isolated from PCV.

91. The Replikin sequence of claim 90 wherein said Replikin sequence is one of SEQ ID NOS: 291-307, SEQ ID NOS: 308-310, SEQ ID NOS: 324-327, SEQ ID NOS: 328-340, SEQ ID NOS: 416-419, SEQ ID NOS: 422-437, SEQ ID NOS: 440-445, SEQ ID NOS: 452-457, SEQ ID NOS: 464-476, SEQ ID NOS: 482-484, SEQ ID NOS: 487-491 or SEQ ID NO: 492.

92. The Replikin sequence of claim 79 wherein said Replikin Peak Gene is isolated from white spot syndrome virus.

93. The Replikin sequence of claim 92 wherein said Replikin sequence is one of SEQ ID NOS: 663-667, SEQ ID NOS: 670-1166, SEQ ID NOS: 1169-1529, SEQ ID NOS: 1532-1542 and SEQ ID NO: 1548.

94. A vaccine for prevention and/or treatment of a viral or organismal infection or a malignancy wherein the vaccine comprises at least one isolated or synthesized Replikin sequence within a protein or protein fragment of a Replikin Peak Gene or a protein comprising a Replikin Peak Gene identified in said virus, organism, or malignancy.

95. The vaccine of claim 94 wherein said at least one isolated or synthesized Replikin sequence is one of SEQ ID NOS: 2902-2925, SEQ ID NOS: 2312-2544, SEQ ID NOS: 2701-2711, 2713-2718, SEQ ID NOS: 3282-3285, 3287-3291, 3293, 3295, 3297, 3299, 3300, 3302, 3304, 3306, 3308, SEQ ID NOS: 1685-1691, SEQ ID NOS: 1702-1717, SEQ ID NOS: 547-562, SEQ ID NO: 106, SEQ ID NO: 112, SEQ ID NO: 113, SEQ ID NOS: 125-129, and SEQ ID NOS: 131-156, SEQ ID NOS: 233-244, SEQ ID NOS: 286-290, SEQ ID NOS: 312-323, SEQ ID NOS: 354-366, SEQ ID NOS: 368-380, SEQ ID NOS: 383-393, SEQ ID NOS: 395-401, SEQ ID NOS: 403-414, SEQ ID NOS: 291-307, SEQ ID NOS: 308-310, SEQ ID NOS: 324-327, SEQ ID NOS: 328-340, SEQ ID NOS: 416-419, SEQ ID NOS: 422-437, SEQ ID NOS: 440-445, SEQ ID NOS: 452-457, SEQ ID NOS: 464-476, SEQ ID NOS: 482-484 SEQ ID NOS: 487-492, SEQ ID NOS: 663-667, SEQ ID NOS: 670-1166, SEQ ID NOS: 1169-1529, SEQ ID NOS: 1532-1542, SEQ ID NO: 1548, SEQ ID NOS: 1637-1662, or SEQ ID NO: 1663.

96. The vaccine of claim 94 for prevention and/or treatment of a viral infection.

97. The vaccine of claim 96 wherein said viral infection is caused by influenza virus, foot and mouth disease virus, west nile virus, porcine reproductive and respiratory syndrome virus, porcine circovirus, white spot syndrome virus, taura syndrome virus, coronavirus, ebola virus, gemini leaf curl virus, hemorrhagic septicemia virus, or tobacco mosaic virus.

98. The vaccine of claim 97 wherein the influenza virus is Influenza A virus.

99. The vaccine of claim 98 wherein the Influenza A virus is a H1N1, H2N2, H3N2, H5N1 or H3N8.

100. The vaccine of claim 97 wherein the virus is hemorrhagic septicemia virus.

101. The vaccine of claim 94 for prevention and/or treatment of an organismal infection.

102. The vaccine of claim 101 wherein the organismal infection is caused by Mycobacterium tuberculosis, Mycobacterium mucogenicum, Staphylococcus aureus, or Plasmodium falciparum.

103. The vaccine of claim 102 wherein said Staphylococcus aureus is methicillin-resistant.

104. The vaccine of claim 94 wherein the malignancy is a lung malignancy, a brain malignancy, a breast malignancy, an ovarian malignancy, or a lymph malignancy.

105. The vaccine of claim 104 wherein the malignancy is non-small cell lung carcinoma or glioblastoma multiforme.

106. An immunogenic compound comprising at least one isolated or synthesized Replikin sequence within the protein or protein fragment of a Replikin Peak Gene or within a protein comprising a Replikin Peak Gene wherein said Replikin Peak Gene is identified in a virus, an organism or a malignancy.

107. The immunogenic compound of claim 106 further comprising a pharmaceutically acceptable carrier.

108. A method of stimulating the immune system, comprising administering in an animal at least one isolated or synthesized Replikin sequence identified within a protein or protein fragment of a Replikin Peak Gene or within a protein or gene area comprising a Replikin Peak Gene identified in a virus, organism, or malignancy.

109. The method of claim 108 wherein said animal is a human.

110. An antibody to at least one isolated or synthesized Replikin sequence within a protein or protein fragment of Replikin Peak Gene or within a protein or gene area comprising a Replikin Peak Gene.

111. A method of identifying a lethal strain of malignancy, organism or virus comprising:
(1) obtaining a plurality of isolates of said malignancy, organism or virus;
(2) identifying the Replikin Peak Gene in each isolate of the plurality of isolates of said malignancy, organism or virus;
(3) analyzing the amino acid sequence of a protein or protein fragment of the Replikin Peak Gene of each isolate of the plurality of isolates for the presence and concentration of Replikin sequences;
(4) comparing the concentrations of Replikin sequences in each of the proteins or protein fragments of the Replikin Peak Gene of each isolate of the plurality of isolates to the concentration of Replikin sequences in each of the proteins or protein fragments of the Replikin Peak Gene of each of the other isolates of the plurality of isolates; and
(5) identifying the isolate having the highest concentration of continuous Replikin sequences in the protein or protein fragment of the Replikin Peak Gene as a virulent or lethal strain of said malignancy, organism or virus.

112. A method of selecting a peptide from a malignancy, organism or virus for inclusion in a preventive or therapeutic vaccine or immunogenic compound for a malignancy, organism or virus comprising identifying at least one difference in the amino acid sequence of an otherwise conserved Replikin sequence or Replikin Peak Gene between at least two isolates of said malignancy, organism or virus and correlating the identified at least one difference in the amino acid sequence with the highest virulence, morbidity or host mortality among the at least two isolates and selecting an otherwise conserved Replikin sequence, Replikin Peak Gene or Replikin sequence within a Replikin Peak Gene having the identified at least one amino acid sequence difference as the peptide for inclusion in a preventive or therapeutic vaccine or immunogenic compound.

113. The method of claim 112 further predicting the isolate comprising the selected conserved Replikin sequence or Replikin Peak Gene having the at least one difference in the amino acid sequence to be a lethal isolate of said malignancy, organism or virus.

114. The method of claim 113 wherein said malignancy, organism or virus is a malignancy.

115. The method of claim 114 wherein said malignancy is a lung malignancy, a brain malignancy, a breast malignancy or a lymph malignancy.

116. The method of claim 115 wherein said malignancy is a non-small cell lung carcinoma or a glioblastoma multiforme.

117. The method of claim 112 wherein said malignancy, organism or virus is an organism.

118. The method of claim 117 wherein said organism is Mycobacterium tuberculosis, Mycobaterium mucogenicum, Staphylococcus aureus, or Plasmodium falciparum.

119. The method of claim 118 wherein said Staphylococcus aureus is methicillin-resistant.

120. The method of claim 112 wherein said malignancy, organism or virus is a virus.

121. The method of claim 120 wherein said virus is influenza virus, foot and mouth disease virus, west nile virus, porcine reproductive and respiratory syndrome virus, porcine circovirus, white spot syndrome virus, taura syndrome virus, coronavirus, ebola virus, gemini leaf curl virus, hemorrhagic septicemia virus or tobacco mosaic virus.

122. A method of determining a source of a case of lung malignancy comprising identifying at least one peptide in a Replikin Peak Gene of a lung cancer cell that is also present in a Replikin Peak Gene of an isolate of tobacco mosaic virus, wherein the peptide is involved with the source of the lung malignancy.

123. The method of claim 122 wherein a plurality of peptides is identified in the Replikin Peak Gene of the lung cancer cell wherein each one of the plurality of peptides is also identified in the Replikin Peak Gene of an isolate of tobacco mosaic virus.

124. The method of claim 122 wherein the at least one peptide in the Replikin Peak Gene of the lung cancer cell and the at least one peptide in Replikin Peak Gene of the isolate of tobacco mosaic virus is a peptide of about 10 amino acids or less comprising at least two lysines and at least one histidine.

125. The method of claim 124 wherein the at least one peptide in the Replikin Peak Gene of the lung cancer cell and the at least one peptide in Replikin Peak Gene of the isolate of tobacco mosaic virus is a peptide of about 10 amino acids or less comprising at least three lysines and at least one histidine.

126. The method of claim 125 wherein the at least one peptide in the Replikin Peak Gene of the lung cancer cell and the at least one peptide in the Replikin Peak Gene of the isolate of tobacco mosaic virus is about 7 amino acids or less comprising at least three lysines and at least one histidine.

127. The method of claim 126 wherein the at least one peptide in the Replikin Peak Gene of the lung cancer cell and the at least one peptide in the Replikin Peak Gene of the isolate of tobacco mosaic virus is about 4 amino acids comprising three lysines and one histidine.

128. The method of claim 127 wherein the at least one peptide in the Replikin Peak Gene of the lung cancer cell and in the Replikin Peak Gene of the isolate of tobacco mosaic virus is KHKK (SEQ ID NO: 1584).

129. The method of claim 128 wherein more than one KHKK (SEQ ID NO: 1584) peptide is identified in the Replikin Peak Gene of the lung cancer cell and in the Replikin Peak Gene of the isolate of tobacco mosaic virus.

130. The method of claim 129 wherein at least 10 KHKK (SEQ ID NO: 1584) peptides are identified in the Replikin Peak Gene of the lung cancer cell and at least 10 KHKK (SEQ ID NO: 1584) peptides are identified in the Replikin Peak Gene of the isolate of tobacco mosaic virus.

131. The method of claim 130 wherein at least 20 KHKK (SEQ ID NO: 1584) peptides are identified in the Replikin Peak Gene of the lung cancer cell and at least 20 K-HKK (SEQ ID NO: 1584) peptides are identified in the Replikin Peak Gene of the isolate of tobacco mosaic virus.

132. The method of claim 131 wherein at least 30 KHKK (SEQ ID NO: 1584) peptides are identified in the Replikin Peak Gene of the lung cancer cell and at least 30 KHKK peptides are identified in the Replikin Peak Gene of the isolate of tobacco mosaic virus.

133. The method of claim 132 wherein at least 50 KHKK (SEQ ID NO: 1584) peptides are identified in the Replikin Peak Gene of the lung cancer cell and at least 50 KHKK (SEQ ID NO: 1584) peptides are identified in the Replikin Peak Gene of the isolate of tobacco mosaic virus.

134. A method of identifying a first case of malignancy of the lung having a higher rate of replication, aggressive growth pattern or lethality as compared with a second case of malignancy of the lung comprising identifying a Replikin Peak Gene in a malignant cell from a first case of malignancy of the lung that has a higher Replikin Count in the Replikin Peak Gene than a Replikin Peak Gene identified in a malignant cell from a second case of malignancy of the lung.

135. The method of claim 134 wherein the first and second cases of malignancy of the lung are non-small cell lung malignancies.

136. An isolated or synthesized Replikin Peak Gene in a lung malignancy for diagnosis, prevention or treatment of lung cancer by the method comprising:
(1) obtaining at least one malignant cell from a lung malignancy;
(2) analyzing the protein sequences or protein sequence fragments of the at least one malignant cell for the presence and concentration of Replikin sequences;
(3) identifying the protein sequence or the protein sequence fragment having the highest concentration of continuous Replikin sequences in the at least one malignant cell;
(4) selecting the protein sequence or protein sequence fragment having the highest concentration of continuous Replikin sequences;
(5) identifying the amino acid sequence of the selected protein sequence or protein sequence fragment as the Replikin Peak Gene; and
(6) isolating or synthesizing the identified Replikin Peak Gene of the at least one malignant cell, wherein the isolated or synthesized identified Replikin Peak Gene is useful for diagnosis, prevention or treatment of lung cancer.

137. The method of claim 136 wherein the lung malignancy is a non-small cell lung malignancy.

138. The method of claim 137 wherein at least one Replikin sequence within the protein or protein fragment of the identified Replikin Peak Gene is isolated or synthesized for diagnosis, prevention or treatment of lung cancer.

139. The method of claim 138 wherein the at least one Replikin sequence within the protein or protein fragment of the identified Replikin Peak Gene is one of SEQ ID NOS: 1585-1635 of SEQ ID NO: 1636.

140. An immunogenic composition for prevention and treatment of lung cancer, wherein the immunogenic composition comprises at least one isolated or synthesized Replikin sequence within the protein or protein fragment of an identified Replikin Peak Gene.

141. A method of stimulating the immune system, comprising administering in an animal the at least one isolated or synthesized Replikin sequence identified within the Replikin Peak Gene of the lung malignancy for prevention, treatment or diagnosis of lung cancer in an animal.

142. The method of claim 141, wherein the animal is a human.

143. An antibody to at least one isolated or synthesized Replikin sequence within the Replikin Peak Gene sequence of a lung malignancy.

144. A method of identification of a lethal form of lung cancer comprising:
(1) obtaining at least one malignant cell from a plurality of lung tumors;
(2) identifying the Replikin Peak Gene in the at least one malignant cell of each of the plurality of lung tumors;
(3) analyzing the amino acid sequence of a protein or protein fragment of the Replikin Peak Gene in the at least one malignant cell of each of the plurality of lung tumors for the presence and concentration of Replikin sequences;
(4) comparing the concentrations of Replikin sequences in each of the proteins or protein fragments of the Replikin Peak Gene in the at least one malignant cell of each of the plurality of lung tumors; and
(5) identifying the lung tumor having the highest concentration of continuous Replikin sequences in the protein or protein fragment of the Replikin Peak Gene as a lethal form of lung cancer.

145. A method of identification of a more lethal form of lung cancer among at least two lung cancers, comprising:
(1) obtaining at least one malignant cell from each of at least two lung cancers;
(2) identifying the Replikin Peak Gene in the at least one malignant cell of each of the at least two lung cancers;
(3) analyzing the amino acid sequence of a protein or protein fragment of the Replikin Peak Gene in the at least one malignant cell of each of the at least two lung cancers for the presence and concentration of Replikin sequences;
(4) comparing the concentrations of Replikin sequences in each of the proteins or protein fragments of the Replikin Peak Gene in the at least one malignant cell of each of the at least two lung cancers; and
(5) identifying the lung cancer having the highest concentration of continuous Replikin sequences in the protein or protein fragment of the Replikin Peak Gene as the more lethal form of lung cancer.

146. A method of determining an expected increase in lethality or virulence of a virus or organism which method comprises:
(1) obtaining a plurality of isolates of said virus or organism wherein each isolate is isolated within a known time period and wherein at least two of said isolates is isolated about six months to about 5 years later than at least two other of said isolates;
(2) identifying a Replikin Peak Gene in each isolate of said plurality of isolates;
(3) analyzing the identified Replikin Peak Gene of each isolate of the plurality of isolates to determine the Replikin Count of each Replikin Peak Gene of each isolate of the plurality of isolates, or analyzing a protein, protein fragment, or gene area comprising the identified Replikin Peak Gene of each isolate of the plurality of isolates to determine the Replikin Count of the protein, protein fragment, or gene area of the plurality of isolates;
(4) determining a mean Replikin Count within the Replikin Peak Gene or within the protein, protein fragment, or gene area comprising said identified Replikin Peak Gene for each known time period;
(5) comparing the mean Replikin Count within the Replikin Peak Gene or within the protein, protein fragment, or gene area for each known time period one to another;
(6) identifying an increase in the mean Replikin Count between at least two known time periods; and
(7) identifying an expected increase in lethality or virulence of said virus, or organism within about six months to about three years following said identified increase in the mean Replikin Count.

147. The method of claim 146, wherein the known time period is 1 year.

148. The method of claim 147, wherein the increase in mean Replikin Count occurs over one year.

149. The method of claim 147, wherein the increase in mean Replikin Count occurs over three years.

150. The method of claim 146, wherein said increase in mean Replikin Count is significant between at least two known time periods.

151. The method of claim 149, wherein said increase in mean Replikin Count has a significance of p=<0.001.

The application's sequence listing, which the Patent Office published only in electronic form, follows.

SEQUENCE LISTING (3823 sequences)

SEQ ID NO: 1 - protein, 13 aa, Human influenza virus
KANKIKSEKTHIH

SEQ ID NO: 2 - protein, 15 aa, Human influenza virus
HFQRKRRVRDNMTKK

SEQ ID NO: 3 - protein, 14 aa, Human influenza virus
HFQRKRRVRDNMTK

SEQ ID NO: 4 - protein, 14 aa, Chicken influenza virus
HFHRKRRVRDNMTK

SEQ ID NO: 5 - protein, 15 aa, Chicken influenza virus
HFHRKRRVRDNMTKK

SEQ ID NO: 6 - protein, 12 aa, Chicken influenza virus
HRKRRVRDNMTK

SEQ ID NO: 7 - protein, 15 aa, Human influenza virus
HTYYLEKANKIKSEK

SEQ ID NO: 8 - protein, 17 aa, Human influenza virus
KDVMESMDKEEMEITTH

SEQ ID NO: 9 - protein, 17 aa, Chicken influenza virus
KDVIESMDKDCMEITTH

SEQ ID NO: 10 - protein, 17 aa, Chicken influenza virus
KDVMESMDKECMEVTTH

SEQ ID NO: 11 - protein, 23 aa, Chicken influenza virus
KAMKEYGEDPKIETNKFAAICTH

SEQ ID NO: 12 - protein, 13 aa, Human influenza virus
KANKIKSEKTHIH

SEQ ID NO: 13 - protein, 24 aa, Human influenza virus
KAMKEYGEDPIKIETNKFAAICTH

SEQ ID NO: 14 - protein, 45 aa, Human influenza virus
HYLRIMSPVDMHKQIVYWKQWLSLKNPTQGSLKTRVLKRWKLFNK

SEQ ID NO: 15 - protein, 90 aa, Human influenza virus
MEQGQDTPWTPSTEHTNIQKRGSGQQTQRLEHPNSTRLMDHYLRIMSPVDMHKQIVYWKQWLSLKNPTQGSLKTRVLKRWKLFNKQEWIN

SEQ ID NO: 16 - protein, 27 aa, Human influenza virus
HTNIQKRGSGQQTQRLEHPNSTRLMDH

SEQ ID NO: 17 - protein, 18 aa, Human influenza virus
YLRIMSPVDMHKQIVYWK

SEQ ID NO: 18 - protein, 51 aa, Human influenza virus
HTNIQKRGSGQQTQRLEHPNSTRLMDHYLRIMSPVDMHKQIVYWKQWLSLK

SEQ ID NO: 19 - protein, 28 aa, Human influenza virus
HPNSTRLMDHYLRIMSPVDMHKQIVYWK

SEQ ID NO: 20 - protein, 50 aa, Human influenza virus
HPNSTRLMDHYLRIMSPVDMHKQIVYWKQWLSLKNPTQGSLKTRVLKRWK

SEQ ID NO: 21 - protein, 34 aa, Human influenza virus
HPNSTRLMDHVLRIMSPVDMHKQIVYWKQWLSLK

SEQ ID NO: 22 - protein, 42 aa, Human influenza virus
HPNSTRLMDHYLRIMSPVDMHKQIVYWKQWLSLKNPTQGSLK

SEQ ID NO: 23 - protein, 45 aa, Human influenza virus; identical to SEQ ID NO: 14

SEQ ID NO: 24 - protein, 33 aa, Human influenza virus
HYLRIMSPVDMHKQIVYWKQWLSLKNPTQGSLK

SEQ ID NO: 25 - protein, 19 aa, Human influenza virus
HYLRIMSPVDMHKQIVYWK

SEQ ID NO: 26 - protein, 41 aa, Human influenza virus
HYLRIMSPVDMHKQIVYWKQWLSLKNPTQGSLKTRVLKRWK

SEQ ID NO: 27 - protein, 25 aa, Human influenza virus
HYLRIMSPVDMHKQIVYWKQWLSLK

SEQ ID NO: 28 - protein, 8 aa, Human influenza virus
HKQIVYWK

SEQ ID NO: 29 - protein, 30 aa, Human influenza virus
HKQIVYWKQWLSLKNPTQGSLKTRVLKRWK

SEQ ID NO: 30 - protein, 14 aa, Human influenza virus
HKQIVYWKQWLSLK

SEQ ID NO: 31 - protein, 34 aa, Human influenza virus
HKQIVYWKQWLSLKNPTQGSLKTRVLKRWKLFNK

SEQ ID NO: 32 - protein, 21 aa, Human influenza virus
HKQIVYWKQLSLKNPTQGSLK

SEQ ID NO: 33 - protein, 90 aa, Human influenza virus; identical to SEQ ID NO: 15

SEQ ID NO: 34 - protein, 45 aa, Human influenza virus
HTNIQKRGSGQQTQRLEHPNSTRLMDHYLRIMSPVDMHKQIVYWK

SEQ ID NO: 35 - protein, 51 aa, Human influenza virus; identical to SEQ ID NO: 18

SEQ ID NO: 36 - protein, 28 aa, Human influenza virus
HPNSTRLMDHYLRIMSPVDMHKQIVYWK

SEQ ID NO: 37 - protein, 50 aa, Human influenza virus; identical to SEQ ID NO: 20

SEQ ID NO: 38 - protein, 34 aa, Human influenza virus
HPNSTRLMDHYLRIMSPVDMHKQIVYWKQWLSLK

SEQ ID NO: 39 - protein, 42 aa, Human influenza virus; identical to SEQ ID NO: 22

SEQ ID NO: 40 - protein, 45 aa, Human influenza virus; identical to SEQ ID NO: 14

SEQ ID NO: 41 - protein, 33 aa, Human influenza virus; identical to SEQ ID NO: 24

SEQ ID NO: 42 - protein, 19 aa, Human influenza virus
HYLRIMSPVDMHKQIVYWK

SEQ ID NO: 43 - protein, 41 aa, Human influenza virus; identical to SEQ ID NO: 26

SEQ ID NO: 44 - protein, 25 aa, Human influenza virus
HYLRIMSPVDMHKQIVYWKQWLSLK

SEQ ID NO: 45 - protein, 8 aa, Human influenza virus
HKQIVYWK

SEQ ID NO: 46 - protein, 30 aa, Human influenza virus; identical to SEQ ID NO: 29

SEQ ID NO: 47 - protein, 14 aa, Human influenza virus
HKQIVYWKQWLSLK

SEQ ID NO: 48 - protein, 34 aa, Human influenza virus; identical to SEQ ID NO: 31

SEQ ID NO: 49 - protein, 22 aa, Human influenza virus
HKQIVYWKQWLSLKNPTQGSLK

SEQ ID NO: 50 - protein, 91 aa, Human influenza virus
MEQGQDTPWTPSTEHTSIQKRGSGQQTQRLEHNPNSTRLMDHYLRIMSPVDMHKQIVYWKQWLSLKNPTQGSLKTHVLKRWKLFNKQEWIN

SEQ ID NO: 51 - protein, 45 aa, Human influenza virus
HTSIQKRGSGQQTQRLEHPNSTRLMDHYLRIMSPVDMHKQIVYWK

SEQ ID NO: 52 - protein, 51 aa, Human influenza virus
HTSIQKRGSGQQTQRLEHPNSTRLMDHYLRIMSPVDMHKQIVYWKQWLSLK

SEQ ID NO: 53 - protein, 28 aa, Human influenza virus
HPNSTRLMDHYLRIMSPVDMHKQIVVWK

SEQ ID NO: 54 - protein, 50 aa, Human influenza virus
HPNSTRLMDHYLRIMSPVDMHKQIVVWKQWLSLKNPTQGSLKTHVLKRWK

SEQ ID NO: 55 - protein, 34 aa, Human influenza virus
HPNSTRLMDHYLRIMSPVDMHKQIVVWKQWLSLK

SEQ ID NO: 56 - protein, 42 aa, Human influenza virus
HPNSTRLMDHYLRIMSPVDMHKQIVVWKQWLSLKNPTQGSLK

SEQ ID NO: 57 - protein, 45 aa, Human influenza virus
HYLRIMSPVDMHKQIVYWKQWLSLKNPTQGSLKTHVLKRWKLFNK

SEQ ID NO: 58 - protein, 33 aa, Human influenza virus; identical to SEQ ID NO: 24

SEQ ID NO: 59 - protein, 19 aa, Human influenza virus
HYLRIMSPVDMHKQIVYWK

SEQ ID NO: 60 - protein, 41 aa, Human influenza virus
HYLRIMSPVDMHKQIVYWKQWLSLKNPTQGSLKTHVLKRWK

SEQ ID NO: 61 - protein, 25 aa, Human influenza virus
HYLRIMSPVDMHKQIVYWKQWLSLK

SEQ ID NO: 62 - protein, 8 aa, Human influenza virus
HKQIVYWK

SEQ ID NO: 63 - protein, 30 aa, Human influenza virus
HKQIVYWKQWLSLKNPTQGSLKTHVLKRWK

SEQ ID NO: 64 - protein, 14 aa, Human influenza virus
HKQIVYWKQWLSLK

SEQ ID NO: 65 - protein, 34 aa, Human influenza virus
HKQIVYWKQWLSLKNPTQGSLKTHVLKRWKLFNK

SEQ ID NO: 66 - protein, 22 aa, Human influenza virus
HKQIVYWKQWLSLKNPTQGSLK

SEQ ID NO: 67 - protein, 23 aa, Human influenza virus
KQIVYWKQWLSLKNPTQGSLKTH

SEQ ID NO: 68 - protein, 17 aa, Human influenza virus
KQWLSLKNPTQGSLKTH

SEQ ID NO: 69 - protein, 11 aa, Human influenza virus
KNPTQGSLKTH

SEQ ID NO: 70 - protein, 9 aa, Human influenza virus
KTHVLKRWK

SEQ ID NO: 71 - protein, 11 aa, Human influenza virus
HVLKRWKLFNK

SEQ ID NO: 72 - protein, 13 aa, Human influenza virus
KANKIKSEKTHIH

SEQ ID NO: 73 - protein, 15 aa, Human influenza virus
HFQRKRRVRDNMTKK

SEQ ID NO: 74 - protein, 15 aa, Human influenza virus
HFQRKRRVRDNMTKK

SEQ ID NO: 75 - protein, 13 aa, Human influenza virus
KANKIKSEKTHIH

SEQ ID NO: 76 - protein, 15 aa, Human influenza virus
HFQRKRRVRDNMTKK

SEQ ID NO: 77 - protein, 14 aa, Human influenza virus
HFQRKRRVRDNMTK

SEQ ID NO: 78 - protein, 13 aa, Human influenza virus
KANKIKSEKTHIH

SEQ ID NO: 79 - protein, 15 aa, Human influenza virus
HFQRKRRVRDNMTKK

SEQ ID NO: 80 - protein, 14 aa, Human influenza virus
HFQRKRRVRDNMTK

SEQ ID NO: 81 - protein, 15 aa, Human influenza virus
HTYYLEKANKIKSEK

SEQ ID NO: 82 - protein, 13 aa, Human influenza virus
KANKIKSEKTHIH

SEQ ID NO: 83 - protein, 15 aa, Human influenza virus
HFQRKRRVRDNMTKK

SEQ ID NO: 84 - protein, 14 aa, Human influenza virus
HFQRKRRVRDNMTK

SEQ ID NO: 85 - protein, 15 aa, Human influenza virus
HTYYLEKANKIKSEK

SEQ ID NO: 86 - protein, 17 aa, Human influenza virus
KDVMESMDKEEMEITTH

SEQ ID NO: 87 - protein, 17 aa, Human influenza virus
KDVMEMSDKEEMEITTH

SEQ ID NO: 88 - protein, 17 aa, Human influenza virus
KDVMESMDKEEMEITTH

SEQ ID NO: 89 - protein, 17 aa, Human influenza virus
KDVMESMDKEEMEITTH

SEQ ID NO: 90 - protein, 17 aa, Human influenza virus
KDVMESMDKEEMEITTH

SEQ ID NO: 91 - protein, 10 aa, Foot and Mouth Disease virus
HKQKIVAPVK

SEQ ID NO: 92 - protein, 16 aa, Foot and Mouth Disease virus
HPSEARHKQKIVAPVK

SEQ ID NO: 93 - protein, 16 aa, Foot and Mouth Disease virus
HPTEARHKQKIVAPVK

SEQ ID NO: 94 - protein, 10 aa, Foot and Mouth Disease virus
HKQKIVAPVK

SEQ ID NO: 95 - protein, 16 aa, Foot and Mouth Disease virus
HPSEARHKQKIVAPVK

SEQ ID NO: 96 - protein, 16 aa, Foot and Mouth Disease virus
HPTEARHKQKIVAPVK

SEQ ID NO: 97 - protein, 16 aa, Foot and Mouth Disease virus
HPSEARHKQKIVAPVK

SEQ ID NO: 98 - protein, 16 aa, Foot and Mouth Disease virus
HPTEARHKQKIVAPVK

SEQ ID NO: 99 - protein, 10 aa, Foot and Mouth Disease virus
HKQKIVAPVK

SEQ ID NO: 100 - protein, 16 aa, Foot and Mouth Disease virus
HPSEARHKQKIVAPVK

SEQ ID NO: 101 - protein, 16 aa, Foot and Mouth Disease virus
HPTEARHKQKIVAPVK

SEQ ID NO: 102 - protein, 10 aa, Foot and Mouth Disease virus
HKQKIVAPVK

SEQ ID NO: 103 - protein, 16 aa, Foot and Mouth Disease virus
HPSEARHKQKIVAPVK

SEQ ID NO: 104 - protein, 16 aa, Foot and Mouth Disease virus
HPTEARHKQKIVAPVK

SEQ ID NO: 105 - protein, 10 aa, Foot and Mouth Disease virus
HKQKIVAPVK

SEQ ID NO: 106 - protein, 10 aa, Foot and Mouth Disease virus
HKQKIVAPVK

SEQ ID NO: 107 - protein, 55 aa, Foot and Mouth Disease virus
LPTSFNYGAIKATRVTELLYRMKRAETYCPRPLLAIHPSEARHKQKIVAPVKQLL

SEQ ID NO: 108 - protein, 16 aa, Foot and Mouth Disease virus
HPSEARHKQKIVAPVK

SEQ ID NO: 109 - protein, 10 aa, Foot and Mouth Disease virus
HKQKIVAPVK

SEQ ID NO: 110 - protein, 55 aa, Foot and Mouth Disease virus; identical to SEQ ID NO: 107

SEQ ID NO: 111 - protein, 163 aa, Foot and Mouth Disease virus
  MOD_RES (37)..(37): Variable amino acid
NVLDLMQTPAHTLVGALLRTATYYFADLEVAVKHEGXLTWVPNGAPESALDNTTNPTAYHKAPLTRLALPYTAPHRVLATVYNGSCKYSGVAVPNVRGDLHVLAQKVARTLPTSFNYGAIKATRVTEMLYRMKRAETYCPRALLAIHPSEARHKQKIVAPVKQ

SEQ ID NO: 112 - protein, 16 aa, Foot and Mouth Disease virus
HPSEARHKQKIVAPVK

SEQ ID NO: 113 - protein, 16 aa, Foot and Mouth Disease virus
HPTEARHKQKIVAPVK

SEQ ID NO: 114 - protein, 213 aa, Foot and Mouth Disease virus
  MOD_RES (97)..(97): Variable amino acid
  MOD_RES (199)..(199): Variable amino acid
TTSTGESADPVTATVENYGGETQVQRRQHTDVSFILDRFVKVTPKDQINVLDLMQIPAHTLVGALLRTATYYFADLEVAVKHEGNLTWVPNGAPEAXLDNTTNPTAYHKAPLTRLALPYTAPHRVLATVYNGNCKYGESPVTNLRGDLQVLTQKAARTLPTSFNYGAIKATRVTELLYRMKRAETYCPRPLLAIHPSEXRHKQKIVAPVKQLL

SEQ ID NO: 115 - protein, 16 aa, Foot and Mouth Disease virus
  MOD_RES (5)..(5): Variable amino acid
HPSEXRHKQKIVAPVK

SEQ ID NO: 116 - protein, 10 aa, Foot and Mouth Disease virus
HKQKIVAPVK

SEQ ID NO: 117 - protein, 213 aa, Foot and Mouth Disease virus; identical to SEQ ID NO: 114
  MOD_RES (97)..(97): Variable amino acid
  MOD_RES (199)..(199): Variable amino acid

SEQ ID NO: 118 - protein, 55 aa, Foot and Mouth Disease virus
RVTELLYRMKRAETYCPRPILAIHPSGARHKQKIVAPVKQLLNFDLLKLAGDVES

SEQ ID NO: 119 - protein, 25 aa, Foot and Mouth Disease virus
HPSGARHKQKIVAPVKQLLNFDLLK

SEQ ID NO: 120 - protein, 16 aa, Foot and Mouth Disease virus
HPSGARHKQKIVAPVK

SEQ ID NO: 121 - protein, 19 aa, Foot and Mouth Disease virus
HKQKIVAPVKQLLNFDLLK

SEQ ID NO: 122 - protein, 10 aa, Foot and Mouth Disease virus
HKQKIVAPVK

SEQ ID NO: 123 - protein, 55 aa, Foot and Mouth Disease virus; identical to SEQ ID NO: 118

SEQ ID NO: 124 - protein, 94 aa, Foot and Mouth Disease virus
HKQKIVAPAKQLLNFDLLKLAGDVESNPGPFFFSDVRANFTKLVDTVNQMQEDMSTKHGPDFNRLVSAFEELAAGVKAIRTGLDEAKPWYKLIK

SEQ ID NO: 125 - protein, 10 aa, Foot and Mouth Disease virus
HKQKIVAPAK

SEQ ID NO: 126 - protein, 19 aa, Foot and Mouth Disease virus
HKQKIVAPAKQLLNFDLLK

SEQ ID NO: 127 - protein, 49 aa, Foot and Mouth Disease virus
KQLLNFDLLKLAGDVESNPGPFFFSDVRANFTKLVDTVNQMQEDMSTKH

SEQ ID NO: 128 - protein, 30 aa, Foot and Mouth Disease virus
HGPDFNRLVSAFEELAAGVKAIRTGLDEAK

SEQ ID NO: 129 - protein, 37 aa, Foot and Mouth Disease virus
HGPDFNRLVSAFEELAAGVKAIRTGLDEAKPWYKLIK

SEQ ID NO: 130 - protein, 182 aa, Foot and Mouth Disease virus
KGKPFNSKVIIATTNLYSGFTPRTMVCPDALNRRFHFDIDVSAKDGYKVNNKLDIVKALEDTHTNPVAMFQYDCALLNGMAVEMKRMQQDMFKPQPPLQNVYQLVQKVIERVELHEKVSSHPIFKQISIPSQKSVLYFLIEKGQHEAAIEFFEGMVHDSIKEELRPLIQQTSFVKRAFKRLK

SEQ ID NO: 131 - protein, 36 aa, Foot and Mouth Disease virus
KGKPFNSKVIIATTNLYSGFTPRTMVCPDALNRRFH

SEQ ID NO: 132 - protein, 22 aa, Foot and Mouth Disease virus
HFDIDVSAKDGYKVNNKLDIVK

SEQ ID NO: 133 - protein, 17 aa, Foot and Mouth Disease virus
HFDIDVSAKDGYKVNNK

SEQ ID NO: 134 - protein, 20 aa, Foot and Mouth Disease virus
KDGYKVNNKLDIVKALEDTH

SEQ ID NO: 135 - protein, 16 aa, Foot and Mouth Disease virus
KVNNKLDIVKALEDTH

SEQ ID NO: 136 - protein, 31 aa, Foot and Mouth Disease virus
HTNPVAMFQYDCALLNGMAVEMKRMQQDMFK

SEQ ID NO: 137 - protein, 31 aa, Foot and Mouth Disease virus
KRMQQDMFKPQPPLQNVYQLVQKVIERVELH

SEQ ID NO: 138 - protein, 37 aa, Foot and Mouth Disease virus
KRMQQDMFKPQPPLQNVYQLVQKVIERVELHEKVSSH

SEQ ID NO: 139 - protein, 15 aa, Foot and Mouth Disease virus
KVIERVELHEKVSSH

SEQ ID NO: 140 - protein, 39 aa, Foot and Mouth Disease virus
KVIERVELHEKVSSHPIFKQISIPSQKSVLYFLIEKGQH

SEQ ID NO: 141 - protein, 51 aa, Foot and Mouth Disease virus
KVIERVELHEKVSSHPIFKQISIPSQKSVLYFLIEKGQHEAAIEFFEGMVH

SEQ ID NO: 142 - protein, 11 aa, Foot and Mouth Disease virus
KVIERVELHEK

SEQ ID NO: 143 - protein, 11 aa, Foot and Mouth Disease virus
HEKVSSHPIFK

SEQ ID NO: 144 - protein, 19 aa, Foot and Mouth Disease virus
HEKVSSHPIFKQISIPSQK

SEQ ID NO: 145 - protein, 28 aa, Foot and Mouth Disease virus
HEKVSSHPIFKQISIPSQKSVLYFLIEK

SEQ ID NO: 146 - protein, 29 aa, Foot and Mouth Disease virus
KVSSHPIFKQISIPSQKSVLYFLIEKGQH

SEQ ID NO: 147 - protein, 41 aa, Foot and Mouth Disease virus
KVSSHPIFKQISIPSQKSVLYFLIEKGQHEAAIEFFEGMVH

SEQ ID NO: 148 - protein, 9 aa, Foot and Mouth Disease virus
KVSSHPIFK

SEQ ID NO: 149 - protein, 13 aa, Foot and Mouth Disease virus
HPIFKQISIPSQK

SEQ ID NO: 150 - protein, 22 aa, Foot and Mouth Disease virus
HPIFKQISIPSQKSVLYFLIEK

SEQ ID NO: 151 - protein, 21 aa, Foot and Mouth Disease virus
KQISIPSQKSVLYFLIEKGQH

SEQ ID NO: 152 - protein, 33 aa, Foot and Mouth Disease virus
KQISIPSQKSVLYFLIEKGQHEAAIEFFEGMVH

SEQ ID NO: 153 - protein, 13 aa, Foot and Mouth Disease virus
KSVLYFLIEKGQH

SEQ ID NO: 154 - protein, 25 aa, Foot and Mouth Disease virus
KSVLYFLIEKGQHEAAIEFFEGMVH

SEQ ID NO: 155 - protein, 38 aa, Foot and Mouth Disease virus
HEAAIEFFEGMVHDSIKEELRPLIQQTSFVKRAFKRLK

SEQ ID NO: 156 - protein, 26 aa, Foot and Mouth Disease virus
HDSIKEELRPLIQQTSFVKRAFKRLK

SEQ ID NO: 157 - protein, 2322 aa, Foot and Mouth Disease virus
MNTTDCFIALLHILREIKALFLSRTQGKMEFTLYNGERKLFYSRPNNHDNCWLNAILQLFRYVDEPFLEWVYNSPEDLTLEAIDNLEEVTGLELHEGGPPALVVWNIKHLLYTGIGTASRPSEVCMIDGTDVCLADFHAGIFLKGQDHAVFACVTSNGWYAIDDEDFYPWTPDPADVLVFVPYDQEPLNAGWRAKVQKRLRGAGQSSPTTGSQNQSGNTGSIINNYYMQQYQNSMDTQLGDNAISGGSNEGSTDTTSTHTNNTQNNDWFSKLANTAFSGLFGALLADKKTEETTLLEDRILTTRNGHTTSTTQSSVGVTYGYATAEDLVSGPNTSGLETRVVQAERFFKTHLFDWVTSDSFGRCHLLELPTDHKGVYGSLTDSYAYMRNGWDVEVTAVGNQFNGGCLLVAMVPELCSITKREQYQLTLFPHQFINPRTNMTAHITVPYLGVNRYDQYKVHKPWTLAVMVVAPLTVNNEGAPQIKVYANIAPTNVHVAGELPSKEGIFPVACSDGYGGLVTTDPKTADPVYGKVFNPPRNLLPGRFTNLLDVAEACPTFLHFDGDVPYVTTKTDSDRVLAQFDLSLAAKHMSNTFLAGLAQYYAQYSGTINLHFMFTGPTDAKARYMAAYAPPGMEPPKTPEAAAHCIHAEWDTGLNSKFTFSIPYLSAADYAYTASDVAETTNVQGWVCLFQITHGKADGDALVVLASAGKDFDLRLPVDARTQTTSAGESADPVTATVENYGSETQVQRRQHTDVTFILDRFVKVKPKEQVNVLDLMQIPAHTLVGALLRTATYYFSDLELAVKHEGDLTWVPNGAPETALDNTTNPTAYHKEPLTRLALPYTAPHRVLATVYNGSSKYGDTSTNNVRGDLQVLAQKAERTLPTSFNYGAIKATRVTELLYRMKRAETYCPRPLLAIQPSTARHKQKIVAPAKQLLNFDLLKLAGDVESNPGPFFFSDVRANFTKLVDTVNQMQEDMSTKHGPDFNRLVSAFEELAAGVKAIRTGLDEAKPWYKLIKLLSRLSCMAAVAARSKDPVLVAIMLADTGLEILDSTFVVKKISDSLSSLFHVPAPAFSFGAPILLAGLVKVASSFFQSTPEDLERAEKQLKARDINDIFAVLKNGEWLVKLILAIRDWIKAWIASEEKFVTMTDLVPGILEKQRDLNDPGKYKEAKEWLDNARQACLKSGNVHIANLCKVVAPAPSKSRPEPVVVCLRGKSGQGKSFLANVLAQAISTHFTGRTDSVWYCPPDPDHFDGYNQQTVVVMDDLGQNPDGKDFKYFAQMVSTTGFIPPMASLEDKGKPFNSKVIIATTNLYSGFTPRTMVCPDALNRRFHFDIDVSAKDGYKVNNKLDIVKALEDTHTNPVAMFQYDCALLNGMAVEMKRMQQDMFKPQPPLQNVYQLVQKVIERVELHEKVSSHPIFKQISIPSQKSVLYFLIEKGQHEAAIEFFEGMVHDSIKEELRPLIQQTSFVKRAFKRLKENFEIVALCLTLLANIVIMLRQARKRRQSVDDPLDGDITLGDAEKDPLETSGASAVGFRERPPTEQETCEDANAEPVVLGREQPRAEGPYAGPLERQKPLKVKARLPQQEGPYAGPMERQKPLKVKAKAPVVKEGPYEGPVKKPVALKVKAKNLIVTESGAPPTDLQKMVMGDTKPVELILDGKTVVICCATGVFGTAYLVPRHLFAEKYDKIMLDGRALTDSDYRVFEFEIKVKGQDMLSDAALMVLHRGNRVRDITKHFRDVARMKKGTPVVGVINNADVGRLIFSGEALTYKDIVVCMDGDTMPGLFAYRASTKAGYCGGAVLAKDGAETFIVGTHSAGGNGIGYCSCVSRSMLMKMKAHIDPEPHHEGLIVDTRDVEERVHVMRKTKLAPTVAHGVFNPEFGPAALSNKDPRLNEGVVLDDVIFSKHKGDTRMSEEDKALFRRCAADYASRLHSVLGTANAPLSVYEAIKGVDGLDAMEPDTAPGLPWALQGKRRGALIDFENGTVGPEVEAALKLMESREYKFVCQTFLKDEIRPLEKVRAGKTRIVDVLPVEHILYTRMMIGRFCAQMHSNNGPQIGSAVGCNPDVDWQRFGTHFAQYKNVWDVDYSAFDANHCSDAMNIMFEEVFRTEFGFHPNAEWILKTLVNTEHAYENKRITVEGGMPSGCSATSIINTILNNIYVLYALRRHYEGVELDTYTMISYGDDIVVASDYDLDFEALKPHFKSLGQTITPADKSDKGFVLGHSITDVTFLKRHFHMDYGTGFYKPVMASKTLEAILSFARRGTIQEKLISVAGLAVHSGPDEYRGLFEPFQGLFEIPSYRSLYLRWVNAVCGDA

SEQ ID NO: 158 - protein, 17 aa, Foot and Mouth Disease virus
HILREIKALFLSRTQGK

SEQ ID NO: 159 - protein, 31 aa, Foot and Mouth Disease virus
KALFLSRTQGKMEFTLYNGERKLFYSRPNNH

SEQ ID NO: 160 - protein, 38 aa, Foot and Mouth Disease virus
HVAGELPSKEGIFPVACSDGYGGLVTTDPKTADPVYGK

SEQ ID NO: 161 - protein, 10 aa, Foot and Mouth Disease virus
HKQKIVAPAK

SEQ ID NO: 162 - protein, 19 aa, Foot and Mouth Disease virus
HKQKIVAPAKQLLNFDLLK

SEQ ID NO: 163 - protein, 49 aa, Foot and Mouth Disease virus; identical to SEQ ID NO: 127

SEQ ID NO: 164 - protein, 30 aa, Foot and Mouth Disease virus; identical to SEQ ID NO: 128

SEQ ID NO: 165 - protein, 37 aa, Foot and Mouth Disease virus; identical to SEQ ID NO: 129

SEQ ID NO: 166 - protein, 32 aa, Foot and Mouth Disease virus
KQRDLNDPGKYKEAKEWLDNARQACLKSGNVH

SEQ ID NO: 167 - protein, 15 aa, Foot and Mouth Disease virus
HIANLCKVVAPAPSK

SEQ ID NO: 168 - protein, 41 aa, Foot and Mouth Disease virus
KVVAPAPSKSRPEPVVVCLRGKSGQGKSFLANVLAQAISTH

SEQ ID NO: 169 - protein, 36 aa, Foot and Mouth Disease virus; identical to SEQ ID NO: 131

SEQ ID NO: 170 - protein, 22 aa, Foot and Mouth Disease virus
HFDIDVSAKDGYKVNNKLDIVK

SEQ ID NO: 171 - protein, 17 aa, Foot and Mouth Disease virus
HFDIDVSAKDGYKVNNK

SEQ ID NO: 172 - protein, 20 aa, Foot and Mouth Disease virus
KDGYKVNNKLDIVKALEDTH

SEQ ID NO: 173 - protein, 16 aa, Foot and Mouth Disease virus
KVNNKLDIVKALEDTH

SEQ ID NO: 174 - protein, 31 aa, Foot and Mouth Disease virus; identical to SEQ ID NO: 136

SEQ ID NO: 175 - protein, 31 aa, Foot and Mouth Disease virus; identical to SEQ ID NO: 137

SEQ ID NO: 176 - protein, 37 aa, Foot and Mouth Disease virus; identical to SEQ ID NO: 138

SEQ ID NO: 177 - protein, 15 aa, Foot and Mouth Disease virus
KVIERVELHEKVSSH

SEQ ID NO: 178 - protein, 39 aa, Foot and Mouth Disease virus; identical to SEQ ID NO: 140

SEQ ID NO: 179 - protein, 51 aa, Foot and Mouth Disease virus; identical to SEQ ID NO: 141

SEQ ID NO: 180 - protein, 11 aa, Foot and Mouth Disease virus
KVIERVELHEK

SEQ ID NO: 181 - protein, 11 aa, Foot and Mouth Disease virus
HEKVSSHPIFK

SEQ ID NO: 182 - protein, 19 aa, Foot and Mouth Disease virus
HEKVSSHPIFKQISIPSQK

SEQ ID NO: 183 - protein, 28 aa, Foot and Mouth Disease virus
HEKVSSHPIFKQISIPSQKSVLYFLIEK

SEQ ID NO: 184 - protein, 29 aa, Foot and Mouth Disease virus
KVSSHPIFKQISIPSQKSVLYFLIEKGQH

SEQ ID NO: 185 - protein, 41 aa, Foot and Mouth Disease virus; identical to SEQ ID NO: 147

SEQ ID NO: 186 - protein, 9 aa, Foot and Mouth Disease virus
KVSSHPIFK

SEQ ID NO: 187 - protein, 13 aa, Foot and Mouth Disease virus
HPIFKQISIPSQK

SEQ ID NO: 188 - protein, 22 aa, Foot and Mouth Disease virus
HPIFKQISIPSQKSVLYFLIEK

SEQ ID NO: 189 - protein, 21 aa, Foot and Mouth Disease virus
KQISIPSQKSVLYFLIEKGQH

SEQ ID NO: 190 - protein, 33 aa, Foot and Mouth Disease virus; identical to SEQ ID NO: 152

SEQ ID NO: 191 - protein, 13 aa, Foot and Mouth Disease virus
KSVLYFLIEKGQH

SEQ ID NO: 192 - protein, 25 aa, Foot and Mouth Disease virus
KSVLYFLIEKGQHEAAIEFFEGMVH

SEQ ID NO: 193 - protein, 38 aa, Foot and Mouth Disease virus; identical to SEQ ID NO: 155

SEQ ID NO: 194 - protein, 26 aa, Foot and Mouth Disease virus
HDSIKEELRPLIQQTSFVKRAFKRLK

SEQ ID NO: 195 - protein, 37 aa, Foot and Mouth Disease virus
KMVMGDTKPVELILDGKTVVICCATGVFGTAYLVPRH

SEQ ID NO: 196 - protein, 30 aa, Foot and Mouth Disease virus
KPVELILDGKTVVICCATGVFGTAYLVPRH

SEQ ID NO: 197 - protein, 21 aa, Foot and Mouth Disease virus
HRGNRVRDITKHFRDVARMKK

SEQ ID NO: 198 - protein, 20 aa, Foot and Mouth Disease virus
HRGNRVRDITKHFRDVARMK

SEQ ID NO: 199 - protein, 10 aa, Foot and Mouth Disease virus
KHFRDVARMK

SEQ ID NO: 200 - protein, 11 aa, Foot and Mouth Disease virus
KHFRDVARMKK

SEQ ID NO: 201 - protein, 45 aa, Foot and Mouth Disease virus
HGVFNPEFGPAALSNKDPRLNEGVVLDDVIFSKHKGDTRMSEEDK

SEQ ID NO: 202 - protein, 12 aa, Foot and Mouth Disease virus
HKGDTRMSEEDK

SEQ ID NO: 203 - protein, 26 aa, Foot and Mouth Disease virus
KGDTRMSEEDKALFRRCAADYASRLH

SEQ ID NO: 204 - protein, 41 aa, Foot and Mouth Disease virus
KLMESREYKFVCQTFLKDEIRPLEKVRAGKTRIVDVLPVEH

SEQ ID NO: 205 - protein, 33 aa, Foot and Mouth Disease virus
KFVCQTFLKDEIRPLEKVRAGKTRIVDVLPVEH

SEQ ID NO: 206 - protein, 49 aa, Foot and Mouth Disease virus
KFVCQTFLKDEIRPLEKVRAGKTRIVDVLPVEHILYTRMMIGRFCAQMH

SEQ ID NO: 207 - protein, 41 aa, Foot and Mouth Disease virus
KDEIRPLEKVRAGKTRIVDVLPVEHILYTRMMIGRFCAQMH

SEQ ID NO: 208 - protein, 25 aa, Foot and Mouth Disease virus
KDEIRPLEKVRAGKTRIVDVLPVEH

SEQ ID NO: 209 - protein, 51 aa, Foot and Mouth Disease virus
HFKSLGQTITPADKSDKGFVLGHSITDVTFLKRHFHMDYGTGFYKPVMASK

SEQ ID NO: 210 - protein, 29 aa, Foot and Mouth Disease virus
HSITDVTFLKRHFHMDYGTGFYKPVMASK

SEQ ID NO: 211 - protein, 18 aa, Foot and Mouth Disease virus
HFHMDYGTGFYKPVMASK

SEQ ID NO: 212 - protein, 16 aa, Foot and Mouth Disease virus
HMDYGTGFYKPVMASK

SEQ ID NO: 213 - protein, 34 aa, Foot and Mouth Disease virus
KPVMASKTLEAILSFARRGTIQEKLISVAGLAVH

SEQ ID NO: 214 - protein, 11 aa, Foot and Mouth Disease virus
KNKNHYEVIKK

SEQ ID NO: 215 - protein, 10 aa, Foot and Mouth Disease virus
KNKNHYEVIK

SEQ ID NO: 216 - protein, 11 aa, Foot and Mouth Disease virus
KNKNHYEVIKK

SEQ ID NO: 217 - protein, 8 aa, Foot and Mouth Disease virus
KNHYEVIK

SEQ ID NO: 218 - protein, 9 aa, Foot and Mouth Disease virus
KNHYEVIKK

SEQ ID NO: 219 - protein, 38 aa, Foot and Mouth Disease virus
HLQGFANFVKKQTFNKAKWHLGARCHIEKAKGTDHQNK

SEQ ID NO: 220 - protein, 16 aa, Foot and Mouth Disease virus
HLQGFANFVKKQTFNK

SEQ ID NO: 221 - protein, 18 aa, Foot and Mouth Disease virus
HLQGFANFVKKQTFNKAK

SEQ ID NO: 222 - protein, 38 aa, Foot and Mouth Disease virus; identical to SEQ ID NO: 219

SEQ ID NO: 223 - protein, 26 aa, Foot and Mouth Disease virus
KKQTFNKAKWHLGARCHIEKAKGTDH

SEQ ID NO: 224 - protein, 11 aa, Foot and Mouth Disease virus
KKQTFNKAKWH

SEQ ID NO: 225 - protein, 17 aa, Foot and Mouth Disease virus
KKQTFNKAKWHLGARCH

SEQ ID NO: 226 - protein, 10 aa, Foot and Mouth Disease virus
KQTFNKAKWH

SEQ ID NO: 227 - protein, 16 aa, Foot and Mouth Disease virus
KQTFNKAKWHLGARCH

SEQ ID NO: 228 - protein, 25 aa, Foot and Mouth Disease virus
KQTFNKAKWHLGARCHIEKAKGTDH

SEQ ID NO: 229 - protein, 19 aa, Foot and Mouth Disease virus
HLGARCHIEKAKGTDHQNK

SEQ ID NO: 230 - protein, 13 aa, Foot and Mouth Disease virus
HIEKAKGTDHQNK

SEQ ID NO: 231 - protein, 10 aa, Foot and Mouth Disease virus
KAKGTDHQNK

SEQ ID NO: 232 - protein, 8 aa, Foot and Mouth Disease virus
KGTDHQNK

SEQ ID NO: 233 - protein, 27 aa, West Nile Virus
KPLLNSDTSKIKNRIERLKREYSSTWH

SEQ ID NO: 234 - protein, 28 aa, West Nile Virus
KPLLNSDTSKIKNRIERLKREYSSTWHH

SEQ ID NO: 235 - protein, 32 aa, West Nile Virus
KPLLNSDTSKIKNRIERLKREYSSTWHHDENH

SEQ ID NO: 236 - protein, 40 aa, West Nile Virus
KPLLNSDTSKIKNRIERLKREYSSTWHHDENHPYRTWNYH

SEQ ID NO: 237 - protein, 18 aa, West Nile Virus
KIKNRIERLKREYSSTWH

SEQ ID NO: 238 - protein, 19 aa, West Nile Virus
KIKNRIERLKREYSSTWHH

SEQ ID NO: 239 - protein, 23 aa, West Nile Virus
KIKNRIERLKREYSSTWHHDENH

SEQ ID NO: 240 - protein, 31 aa, West Nile Virus
KIKNRIERLKREYSSTWHHDENHPYRTWNYH

SEQ ID NO: 241 - protein, 16 aa, West Nile Virus
KNRIERLKREYSSTWH

SEQ ID NO: 242 - protein, 17 aa, West Nile Virus
KNRIERLKREYSSTWHH

SEQ ID NO: 243 - protein, 21 aa, West Nile Virus
KNRIERLKREYSSTWHHDENH

SEQ ID NO: 244 - protein, 29 aa, West Nile Virus
KNRIERLKREYSSTWHHDENHPYRTWNYH

SEQ ID NO: 245 - protein, 40 aa, West Nile Virus; identical to SEQ ID NO: 236

SEQ ID NO: 246 - protein, 27 aa, West Nile Virus
KPLLNSDTSKIKNRIERLKREYSSTWH

SEQ ID NO: 247 - protein, 28 aa, West Nile Virus
KPLLNSDTSKIKNRIERLKREYSSTWHH

SEQ ID NO: 248 - protein, 32 aa, West Nile Virus; identical to SEQ ID NO: 235

SEQ ID NO: 249 - protein, 40 aa, West Nile Virus; identical to SEQ ID NO: 236

SEQ ID NO: 250 - protein, 18 aa, West Nile Virus
KIKNRIERLKREYSSTWH

SEQ ID NO: 251 - protein, 19 aa, West Nile Virus
KIKNRIERLKREYSSTWHH

SEQ ID NO: 252 - protein, 23 aa, West Nile Virus
KIKNRIERLKREYSSTWHHDENH

SEQ ID NO: 253 - protein, 31 aa, West Nile Virus; identical to SEQ ID NO: 240

SEQ ID NO: 254 - protein, 16 aa, West Nile Virus
KNRIERLKREYSSTWH

SEQ ID NO: 255 - protein, 17 aa, West Nile Virus
KNRIERLKREYSSTWHH

SEQ ID NO: 256 - protein, 21 aa, West Nile Virus
KNRIERLKREYSSTWHHDENH

SEQ ID NO: 257 - protein, 29 aa, West Nile Virus
KNRIERLKREYSSTWHHDENHPYRTWNYH

SEQ ID NO: 258 - protein, 40 aa, West Nile Virus; identical to SEQ ID NO: 236

SEQ ID NO: 259 - protein, 27 aa, West Nile Virus
KPLLNSDTSKIKNRIERLKREYSSTWH

SEQ ID NO: 260 - protein, 28 aa, West Nile Virus
KPLLNSDTSKIKNRIERLKREYSSTWHH

SEQ ID NO: 261 - protein, 32 aa, West Nile Virus; identical to SEQ ID NO: 235

SEQ ID NO: 262 - protein, 40 aa, West Nile Virus; identical to SEQ ID NO: 236

SEQ ID NO: 263 - protein, 18 aa, West Nile Virus
KIKNRIERLKREYSSTWH

SEQ ID NO: 264 - protein, 19 aa, West Nile Virus
KIKNRIERLKREYSSTWHH

SEQ ID NO: 265 - protein, 23 aa, West Nile Virus
KIKNRIERLKREYSSTWHHDENH

SEQ ID NO: 266 - protein, 31 aa, West Nile Virus; identical to SEQ ID NO: 240

SEQ ID NO: 267 - protein, 16 aa, West Nile Virus
KNRIERLKREYSSTWH

SEQ ID NO: 268 - protein, 17 aa, West Nile Virus
KNRIERLKREYSSTWHH

SEQ ID NO: 269 - protein, 21 aa, West Nile Virus
KNRIERLKREYSSTWHHDENH

SEQ ID NO: 270 - protein, 29 aa, West Nile Virus
KNRIERLKREYSSTWHHDENHPYRTWNYH

SEQ ID NO: 271 - protein, 3433 aa, West Nile Virus
MSKKPGGPGKSRAVNMLKRGMPRVLSLIGLKRAMLSLIDGKGPIRFVLALLAFFRFTAIAPTRAVLDRWRGVNKQTAMKHLLSFKKELGTLTSAINRRSSKQKKRGGKTGIAVMIGLIASVGAVTLSNFQGKVMMTVNATDVTDVITIPTAAGKNLCIVRAMDVGYMCDDTITYECPVLSAGNDPEDIDCWCTKSAVYVRYGRCTKTRHSRRSRRSLTVQTHGESTLANKKGAWMDSTKATRYLVKTESWILRNPGYALVAAVIGWMLGSNTMQRVVFVVLLLLVAPAYSFNCLGMSNRDFLEGVSGATWVDLVLEGDSCVTIMSKDKPTIDVKMMNMEAANLAEVRSYCYLATVSDLSTKAACPTMGEAHNDKRADPAFVCRQGVVDRGWGNGCGLFGKGSIDTCAKFACSTKAIGRTILKENIKYEVAIFVHGPTTVESHGNYSTQVGATQAGRFSITPAAPSYTLKLGEYGEVTVDCEPRSGIDTNAYYVMTVGTKTFLVHREWFMDLNLPWSSAGSTVWRNRETLMEFEEPHATKQSVIALGSQEGALHQALAGAIPVEFSSNTVKLTSGHLKCRVKMEKLQLKGTTYGVCSKAFKFLGTPADTGHGTVVLELQYTGTDGPCKVPISSVASLNDLTPVGRLVTVNPFVSVATANAKVLIELEPPFGDSYIVVGRGEQQINHHWHKSGSSIGKAFTTTLKGAQRLAALGDTAWDFGSVGGVFTSVGKAVHQVFGGAFRSLFGGMSWITQGLLGALLLWMGINARDRSIALTFLAVGGVLLFLSVNVHADTGCAIDISRQELRCGSGVFIHNDVEAWMDRYKYYPETPQGLAKIIQKAHKEGVCGLRSVSRLEHQMWEAVKDELNTLLKENGVDLSVVVEKQEGMYKSAPKRLTATTEKLEIGWKAWGKSILFAPELANNTFVVDGPETKECSTQNRAWNSLEVEDFGFGLTSTRMFLKVRESNTTECDSKIIGTAVKNNLAIHSDLSYWIESRLNDTWKLERAVLGEVKSCTWPETHTLWGDGILESDLIIPVTLAGPRSNHNRRPGYKTQNQGPWDEGRVEIDFDYCPGTTVTLSESCGHRGPATRTTTESGKLITDWCCRSCTLPPLRYQTDSGCWYGMEIRPQRHDEKTLVQSQVNAYNADMIDPFQLGLLVVFLATQEVLRKRWTAKISMPAILIALLVLVFGGITYTDVLRYVILVGAAFAESNSGGDVVHLALMATFKIQPVFMVASFLKARWTNQENILLMLAAVFFQMAYHDARQILLWEIPDVLNSLAVAWMILRAITFTTTSNVVVPLLALLTPGLRCLNLDVYRILLLMVGIGSLIREKRSAAAKKKGASLLCLALASTGLFNPMILAAGLIACDPNRKRGWPATEVMTAVGLMFAIVGGLAELDIDSMAIPMTIAGLMFAAFVISGKSTDMWIERTADISWESDAEITGSSERVDVRLDDDGNFQLMNDPGAPWKIWMLRMVCLAISAYTPWAILPSVVGFWITLQYTKRGGVLWDTPSPKEYKKGDTTTGVYRIMTRGLLGSYQAGAGVMVEGVFHTLWHTTKGAALMSGEGRLDPYWGSVKEDRLCYGGPWKLQHKWNGQDEVQMIVVEPGKNVKNVQTKPGVFKTPEGEIGAVTLDFPTGTSGSPIVDKNGDVIGLYGNGVIMPNGSYISAIVQGERMDEPIPAGFEPEMLRKKQITVLDLHPGAGKTRRILPQIIKEAINRRLRTAVLAPTRVVAAEMAEALRGLPIRYQTSAVPREHNGNEIVDVMCHATLTHRLMSPHRVPNYNLFVMDEAHFTDPASIAARGYISTKVELGEAAAIFMTATPPGTSDPFPESNSPISDLQTEIPDRAWNSGYEWITEYTGKTVWFVPSVKMGNEIALCLQRAGKKVVQLNRKSYETEYPKCKNDDWDFVITTDISEMGANFKASRVIDSRKSVKPTIITEGEGRVILGEPSAVTAASAAQRRGRIGRNPSQVGDEYCYGGHTNEDDSNFAHWTEARIMLDNINMPNGLIAQFYQPEREKVYTMDGEYRLRGEERKNFLELLRTADLPVWLAYKVAAAGVSYHDRRWCFDGPRTNTILEDNNEVEVITKLGERKILRPRWIDARVYSDHQALKAFKDFASGKRSQIGLIEVLGKMPEHFMGKTWEALDTMYVVATAEKGGRAHRMALEELPDALQTIALIALLSVMTMGVFFLLMQRKGIGKIGLGGAVLGVATFFCWMAEVPGTKIAGMLLLSLLLMIVLIPEPEKQRSQTDNQLAVFLICVMTLVSAVAANEMGWLDKTKSDISSLFGQRIEVKENFSMGEFLLDLRPATAWSLYAVTTAVLTPLLKHLITSDYINTSLTSINVQASALFTLARGFPFVDVGVSALLLAAGCWGQVTLTVTVTAATLLFCHYAYMVPGWQAEAMRSAQRRTAAGIMKNAVVDGIVATDVPELERTTPIMQKKVGQIMLILVSLAAVVVNPSVKTVREAGILITAAAVTLWENGASSVWNATTAIGLCHIMRGGWLSCLSITWTLIKNMEKPGLKRGGAKGRTLGEVWKERLNQMTKEEFTRYRKEAIIEVDRSAAKHARKEGNVTGGHPVSRGTAKLRWLVERRFLEPVGKVIDLGCGRGGWCYYMATQKRVQEVRGYTKGGPGHEEPQLVQSYGWNIVTMKSGVDVFYRPSECCDTLLCDIGESSSSAEVEEHRTIRVLEMVEDWLHRGPREFCVKVLCPYMPKVIEKMELLQRRYGGGLVRNPLSRNSTHEMYWVSRASGNVVHSVNMTSQVLLGRMEKRTWKGPQYEEDVNLGSGTRAVGKPLLNSDTSKIKNRIERLKREYSSTWHHDENHPYRTWNYHGSYDVKPTGSASSLVNGVVRLLSKPWDTITNVTTMAMTDTTPFGQQRVFKEKVDTKAPEPPEGVKYVLNETTNWLWAFLAREKRPRMCSREEFIRKVNSNAALGAMFEEQNQWRSAREAVEDPKFWEMVDEEREAHLRGECHTCIYNMMGKREKKPGEFGKAKGSRAIWFMWLGARFLEFEALGFLNEDHWLGRKNSGGGVEGLGLQKLGYILREVGTRPGGKIYADDTAGWDTRITRADLENEAKVLELLDGEHRRLARAIIELTYRHKVVKVMRPAADGRTVMDVISREDQRGSGQVVTYALNTFTNLAVQLVRMMEGEGVIGPDDVEKLTKGKGPKVRTWLFENGEERLSRMAVSGDDCVVKPLDDRFATSLHFLNAMSKVRKDIQEWKPSTGWYDWQQVPFCSNHFTELIMKDGRTLVVPCRGQDELVGRARISPGAGWNVRDTACLAKSYAQMWLLLYFHRRDLRLMANAICSAVPVNWVPTGRTTWSIHAGGEWMTTEDMLEVWNRVWIEENEWMEDKTPVEKWSDVPYSGKREDIWCGSLIGTRARATWAENIQVAINQVRAIIGDEKYVDYMSSLKRYEDTTLVEDTVL

SEQ ID NO: 272 - protein, 40 aa, West Nile Virus; identical to SEQ ID NO: 236

SEQ ID NO: 273 - protein, 27 aa, West Nile Virus
KPLLNSDTSKIKNRIERLKREYSSTWH

SEQ ID NO: 274 - protein, 28 aa, West Nile Virus
KPLLNSDTSKIKNRIERLKREYSSTWHH

SEQ ID NO: 275 - protein, 32 aa, West Nile Virus; identical to SEQ ID NO: 235

SEQ ID NO: 276 - protein, 40 aa, West Nile Virus; identical to SEQ ID NO: 236

SEQ ID NO: 277 - protein, 18 aa, West Nile Virus
KIKNRIERLKREYSSTWH

SEQ ID NO: 278 - protein, 19 aa, West Nile Virus
KIKNRIERLKREYSSTWHH

SEQ ID NO: 279 - protein, 23 aa, West Nile Virus
KIKNRIERLKREYSSTWHHDENH

SEQ ID NO: 280 - protein, 31 aa, West Nile Virus; identical to SEQ ID NO: 240

SEQ ID NO: 281 - protein, 16 aa, West Nile Virus
KNRIERLKREYSSTWH

SEQ ID NO: 282 - protein, 17 aa, West Nile Virus
KNRIERLKREYSSTWHH

SEQ ID NO: 283 - protein, 21 aa, West Nile Virus
KNRIERLKREYSSTWHHDENH

SEQ ID NO: 284 - protein, 29 aa, West Nile Virus
KNRIERLKREYSSTWHHDENHPYRTWNYH

SEQ ID NO: 285 - protein, 2322 aa, Foot-and-Mouth Disease virus; identical to SEQ ID NO: 157

SEQ ID NO: 286 - protein, 60 aa, Porcine Reproductive and Respiratory Syndrome Virus
KQQKKKKGNGQPVNQLCQMLGKIIAQQNQSRGKGPGKKSKKKNPEKPHFPLATEDDVRHH

SEQ ID NO: 287 - protein, 60 aa, Porcine Reproductive and Respiratory Syndrome Virus
KQQKRKKGDGQPVNQLCQMLGKIIAQQNQSRGKGPGKKNKKKNPEKPHFPLATEDDVRHH

SEQ ID NO: 288 - protein, 60 aa, Porcine Reproductive and Respiratory Syndrome Virus
KQQKKKKGNGQPVNQLCQMLGKIIAQQNQSRGKGPGKKNRKKNPEKPHFPLATEDDVRHH

SEQ ID NO: 289 - protein, 60 aa, Porcine Reproductive and Respiratory Syndrome Virus
KQQKKKKGNGQPVNQLCQMLGKIIAQQNQSRGRGPGKKNMKRNPEKPHFPLATEDDVRHH

SEQ ID NO: 290 - protein, 29 aa, Porcine Reproductive and Respiratory Syndrome Virus
KGPGKKKNRKRNPEKPHFPLATEDDVRHH

SEQ ID NO: 291 - protein, 10 aa, Porcine Circovirus
KNKNHYEVIK

SEQ ID NO: 292 - protein, 11 aa, Porcine Circovirus
KNKNHYEVIKK

SEQ ID NO: 293 - protein, 8 aa, Porcine Circovirus
KNHYEVIK

SEQ ID NO: 294 - protein, 9 aa, Porcine Circovirus
KNHYEVIKK

SEQ ID NO: 295 - protein, 16 aa, Porcine Circovirus
HLQGFANFVKKQTFNK

SEQ ID NO: 296 - protein, 18 aa, Porcine Circovirus
HLQGFANFVKKQTFNKAK

SEQ ID NO: 297 - protein, 38 aa, Porcine Circovirus; identical to SEQ ID NO: 219

SEQ ID NO: 298 - protein, 26 aa, Porcine Circovirus
KKQTFNKAKWHLGARCHIEKAKGTDH

SEQ ID NO: 299 - protein, 11 aa, Porcine Circovirus
KKQTFNKAKWH

SEQ ID NO: 300 - protein, 17 aa, Porcine Circovirus
KKQTFNKAKWHLGARCH

SEQ ID NO: 301 - protein, 10 aa, Porcine Circovirus
KQTFNKAKWH

SEQ ID NO: 302 - protein, 16 aa, Porcine Circovirus
KQTFNKAKWHLGARCH

SEQ ID NO: 303 - protein, 25 aa, Porcine Circovirus
KQTFNKAKWHLGARCHIEKAKGTDH

SEQ ID NO: 304 - protein, 19 aa, Porcine Circovirus
HLGARCHIEKAKGTDHQNK

SEQ ID NO: 305 - protein, 13 aa, Porcine Circovirus
HIEKAKGTDHQNK

SEQ ID NO: 306 - protein, 10 aa, Porcine Circovirus
KAKGTDHQNK

SEQ ID NO: 307 - protein, 8 aa, Porcine Circovirus
KGTDHQNK

SEQ ID NO: 308 - protein, 11 aa, Porcine Circovirus
KNGRSGPQPHK

SEQ ID NO: 309 - protein, 16 aa, Porcine Circovirus
HLQGFANFVKKQTFNK

SEQ ID NO: 310 - protein, 17 aa, Porcine Circovirus
KKQTFNKVKWYLGARCH

SEQ ID NO: 311 - protein, 29 aa, Porcine Reproductive and Respiratory Syndrome Virus
KGPGKKKNRKRNPEKPHFPLATEDDVRHH

SEQ ID NO: 312 - protein, 28 aa, Porcine Reproductive and Respiratory Syndrome Virus
KGPGKKKNRKRNPEKPHFPLATEDDVRH

SEQ ID NO: 313 - protein, 29 aa, Porcine Reproductive and Respiratory Syndrome Virus
KGPGKKKNRKRNPEKPHFPLATEDDVRHH

SEQ ID NO: 314 - protein, 17 aa, Porcine Reproductive and Respiratory Syndrome Virus
KGPGKKKNRKRNPEKPH

SEQ ID NO: 315 - protein, 24 aa, Porcine Reproductive and Respiratory Syndrome Virus
KKKNRKRNPEKPHFPLATEDDVRH

SEQ ID NO: 316 - protein, 25 aa, Porcine Reproductive and Respiratory Syndrome Virus
KKKNRKRNPEKPHFPLATEDDVRHH

SEQ ID NO: 317 - protein, 13 aa, Porcine Reproductive and Respiratory Syndrome Virus
KKKNRKRNPEKPH

SEQ ID NO: 318 - protein, 12 aa, Porcine Reproductive and Respiratory Syndrome Virus
KKNRKRNPEKPH

SEQ ID NO: 319 - protein, 23 aa, Porcine Reproductive and Respiratory Syndrome Virus
KKNRKRNPEKPHFPLATEDDVRH

SEQ ID NO: 320 - protein, 24 aa, Porcine Reproductive and Respiratory Syndrome Virus
KKNRKRNPEKPHFPLATEDDVRHH

SEQ ID NO: 321 - protein, 22 aa, Porcine Reproductive and Respiratory Syndrome Virus
KNRKRNPEKPHFPLATEDDVRH

SEQ ID NO: 322 - protein, 23 aa, Porcine Reproductive and Respiratory Syndrome Virus
KNRKRNPEKPHFPLATEDDVRHH

SEQ ID NO: 323 - protein, 11 aa, Porcine Reproductive and Respiratory Syndrome Virus
KNRKRNPEKPH

SEQ ID NO: 324 - protein, 10 aa, Porcine circovirus
KNKNHYEVIK

SEQ ID NO: 325 - protein, 11 aa, Porcine circovirus
KNKNHYEVIKK

SEQ ID NO: 326 - protein, 8 aa, Porcine circovirus
KNHYEVIK

SEQ ID NO: 327 - protein, 9 aa, Porcine circovirus
KNHYEVIKK

SEQ ID NO: 328 - protein, 16 aa, Porcine circovirus
HLQGFANFVKKQTFNK

SEQ ID NO: 329 - protein, 18 aa, Porcine circovirus
HLQGFANFVKKQTFNKAK

SEQ ID NO: 330 - protein, 38 aa, Porcine circovirus; identical to SEQ ID NO: 219

SEQ ID NO: 331 - protein, 26 aa, Porcine circovirus
KKQTFNKAKWHLGARCHIEKAKGTDH

SEQ ID NO: 332 - protein, 11 aa, Porcine circovirus
KKQTFNKAKWH

SEQ ID NO: 333 - protein, 17 aa, Porcine circovirus
KKQTFNKAKWHLGARCH

SEQ ID NO: 334 - protein, 10 aa, Porcine circovirus
KQTFNKAKWH

SEQ ID NO: 335 - protein, 16 aa, Porcine circovirus
KQTFNKAKWHLGARCH

SEQ ID NO: 336 - protein, 25 aa, Porcine circovirus
KQTFNKAKWHLGARCHIEKAKGTDH

SEQ ID NO: 337 - protein, 19 aa, Porcine circovirus
HLGARCHIEKAKGTDHQNK

SEQ ID NO: 338 - protein, 13 aa, Porcine circovirus
HIEKAKGTDHQNK

SEQ ID NO: 339 - protein, 10 aa, Porcine circovirus
KAKGTDHQNK

SEQ ID NO: 340 - protein, 8 aa, Porcine circovirus
KGTDHQNK

SEQ ID NO: 341 - protein, 59 aa, Porcine Reproductive and Respiratory Syndrome Virus
KQQKKKKGNGQPVNQLCQMLGKIIAQQNQSRGKGPGKKSKKKNEKPHFPLATEDDVRHH

SEQ ID NO: 342 - protein, 60 aa, Porcine Reproductive and Respiratory Syndrome Virus; identical to SEQ ID NO: 287

SEQ ID NO: 343 - protein, 60 aa, Porcine Reproductive and Respiratory Syndrome Virus; identical to SEQ ID NO: 288

SEQ ID NO: 344 - protein, 29 aa, Porcine Reproductive and Respiratory Syndrome Virus
KGPGKKKNRKRNPEKPHFPLATEDDVRHH

SEQ ID NO: 345 - protein, 11 aa, Porcine circovirus
KNGRSGPQPHK

SEQ ID NO: 346 - protein, 16 aa, Porcine circovirus
HLQGFANFVKKQTFNK

SEQ ID NO: 347 - protein, 17 aa, Porcine circovirus
KKQTFNKVKWYLGARCH

SEQ ID NO: 348 - protein, 16 aa, Porcine circovirus
HLQGFANFVKKQTFNK

SEQ ID NO: 349 - protein, 17 aa, Porcine circovirus
KKQTFNKVKWYLGARCH

SEQ ID NO: 350 - protein, 11 aa, Porcine circovirus
KNGRSGPQPHK

SEQ ID NO: 351 - protein, 16 aa, Porcine circovirus
HLQGFANFVKKQTFNK

SEQ ID NO: 352 - protein, 17 aa, Porcine circovirus
KKQTFNKVKWYLGARCH

SEQ ID NO: 353 - protein, 60 aa, Porcine Reproductive and Respiratory Syndrome Virus; identical to SEQ ID NO: 286

SEQ ID NO: 354 - protein, 48 aa, Porcine Reproductive and Respiratory Syndrome Virus
KQQKKKKGNGQPVNQLCQMLGKIIAQQNQSRGKGPGKKSKKKNPEKPH

SEQ ID NO: 355 - protein, 27 aa, Porcine Reproductive and Respiratory Syndrome Virus
KGPGKKSKKKNPEKPHFPLATEDDVRH

SEQ ID NO: 356 - protein, 28 aa, Porcine Reproductive and Respiratory Syndrome Virus
KGPGKKSKKKNPEKPHFPLATEDDVRHH

SEQ ID NO: 357 - protein, 16 aa, Porcine Reproductive and Respiratory Syndrome Virus
KGPGKKSKKKNPEKPH

SEQ ID NO: 358 - protein, 23 aa, Porcine Reproductive and Respiratory Syndrome Virus
KKSKKKNPEKPHFPLATEDDVRH

SEQ ID NO: 359 - protein, 24 aa, Porcine Reproductive and Respiratory Syndrome Virus
KKSKKKNPEKPHFPLATEDDVRHH

SEQ ID NO: 360 - protein, 12 aa, Porcine Reproductive and Respiratory Syndrome Virus
KKSKKKNPEKPH

SEQ ID NO: 361 - protein, 22 aa, Porcine Reproductive and Respiratory Syndrome Virus
KSKKKNPEKPHFPLATEDDVRH

SEQ ID NO: 362 - protein, 23 aa, Porcine Reproductive and Respiratory Syndrome Virus
KSKKKNPEKPHFPLATEDDVRHH

SEQ ID NO: 363 - protein, 11 aa, Porcine Reproductive and Respiratory Syndrome Virus
KSKKKNPEKPH

SEQ ID NO: 364 - protein, 9 aa, Porcine Reproductive and Respiratory Syndrome Virus
KKKNPEKPH

SEQ ID NO: 365 - protein, 20 aa, Porcine Reproductive and Respiratory Syndrome Virus
KKKNPEKPHFPLATEDDVRH

SEQ ID NO: 366 - protein, 21 aa, Porcine Reproductive and Respiratory Syndrome Virus
KKKNPEKPHFPLATEDDVRHH

SEQ ID NO: 367 - protein, 60 aa, Porcine Reproductive and Respiratory Syndrome Virus; identical to SEQ ID NO: 287

SEQ ID NO: 368 - protein, 48 aa, Porcine Reproductive and Respiratory Syndrome Virus
KQQKRKKGDGQPVNQLCQMLGKIIAQQNQSRGKGPGKKNKKKNPEKPH

SEQ ID NO: 369 - protein, 27 aa, Porcine Reproductive and Respiratory Syndrome Virus
KGPGKKNKKKNPEKPHFPLATEDDVRH

SEQ ID NO: 370 - protein, 28 aa, Porcine Reproductive and Respiratory Syndrome Virus
KGPGKKNKKKNPEKPHFPLATEDDVRHH

SEQ ID NO: 371 - protein, 16 aa, Porcine Reproductive and Respiratory Syndrome Virus
KGPGKKNKKKNPEKPH

SEQ ID NO: 372 - protein, 23 aa, Porcine Reproductive and Respiratory Syndrome Virus
KKNKKKNPEKPHFPLATEDDVRH

SEQ ID NO: 373 - protein, 24 aa, Porcine Reproductive and Respiratory Syndrome Virus
KKNKKKNPEKPHFPLATEDDVRHH

SEQ ID NO: 374 - protein, 12 aa, Porcine Reproductive and Respiratory Syndrome Virus
KKNKKKNPEKPH

SEQ ID NO: 375 - protein, 22 aa, Porcine Reproductive and Respiratory Syndrome Virus
KNKKKNPEKPHFPLATEDDVRH

SEQ ID NO: 376 - protein, 23 aa, Porcine Reproductive and Respiratory Syndrome Virus
KNKKKNPEKPHFPLATEDDVRHH

SEQ ID NO: 377 - protein, 11 aa, Porcine Reproductive and Respiratory Syndrome Virus
KNKKKNPEKPH

SEQ ID NO: 378 - protein, 9 aa, Porcine Reproductive and Respiratory Syndrome Virus
KKKNPEKPH

SEQ ID NO: 379 - protein, 20 aa, Porcine Reproductive and Respiratory Syndrome Virus
KKKNPEKPHFPLATEDDVRH

SEQ ID NO: 380 - protein, 21 aa, Porcine Reproductive and Respiratory Syndrome Virus
KKKNPEKPHFPLATEDDVRHH

SEQ ID NO: 381 - protein, 60 aa, Porcine Reproductive and Respiratory Syndrome Virus; identical to SEQ ID NO: 288

SEQ ID NO: 382 - protein, 60 aa, Porcine Reproductive and Respiratory Syndrome Virus; identical to SEQ ID NO: 288

SEQ ID NO: 383 - protein, 48 aa, Porcine Reproductive and Respiratory Syndrome Virus
KQQKKKKGNGQPVNQLCQMLGKIIAQQNQSRGKGPGKKNRKKNPEKPH

SEQ ID NO: 384 - protein, 48 aa, Porcine Reproductive and Respiratory Syndrome Virus; identical to SEQ ID NO: 354

SEQ ID NO: 385 - protein, 27 aa, Porcine Reproductive and Respiratory Syndrome Virus
KGPGKKNRKKNPEKPHFPLATEDDVRH

SEQ ID NO: 386 - protein, 28 aa, Porcine Reproductive and Respiratory Syndrome Virus
KGPGKKNRKKNPEKPHFPLATEDDVRHH

SEQ ID NO: 387 - protein, 16 aa, Porcine Reproductive and Respiratory Syndrome Virus
KGPGKKNRKKNPEKPH

SEQ ID NO: 388 - protein, 23 aa, Porcine Reproductive and Respiratory Syndrome Virus
KKNRKKNPEKPHFPLATEDDVRH

SEQ ID NO: 389 - protein, 24 aa, Porcine Reproductive and Respiratory Syndrome Virus
KKNRKKNPEKPHFPLATEDDVRHH

SEQ ID NO: 390 - protein, 12 aa, Porcine Reproductive and Respiratory Syndrome Virus
KKNRKKNPEKPH

SEQ ID NO: 391 - protein, 22 aa, Porcine Reproductive and Respiratory Syndrome Virus
KNRKKNPEKPHFPLATEDDVRH

SEQ ID NO: 392 - protein, 23 aa, Porcine Reproductive and Respiratory Syndrome Virus
KNRKKNPEKPHFPLATEDDVRHH

SEQ ID NO: 393 - protein, 11 aa, Porcine Reproductive and Respiratory Syndrome Virus
KNRKKNPEKPH

SEQ ID NO: 394 - protein, 60 aa, Porcine Reproductive and Respiratory Syndrome Virus; identical to SEQ ID NO: 289

SEQ ID NO: 395 - protein, 48 aa, Porcine Reproductive and Respiratory Syndrome Virus
KQQKKKKGNGQPVNQLCQMLGKIIAQQNQSRGRGPGKKNMKRNPEKPH

SEQ ID NO: 396 - protein, 23 aa, Porcine Reproductive and Respiratory Syndrome Virus
KKNMKRNPEKPHFPLATEDDVRH

SEQ ID NO: 397 - protein, 24 aa, Porcine Reproductive and Respiratory Syndrome Virus
KKNMKRNPEKPHFPLATEDDVRHH

SEQ ID NO: 398 - protein, 12 aa, Porcine Reproductive and Respiratory Syndrome Virus
KKNMKRNPEKPH

SEQ ID NO: 399 - protein, 22 aa, Porcine Reproductive and Respiratory Syndrome Virus
KNMKRNPEKPHFPLATEDDVRH

SEQ ID NO: 400 - protein, 23 aa, Porcine Reproductive and Respiratory Syndrome Virus
KNMKRNPEKPHFPLATEDDVRHH

SEQ ID NO: 401 - protein, 11 aa, Porcine Reproductive and Respiratory Syndrome Virus
KNMKRNPEKPH

SEQ ID NO: 402 - protein, 29 aa, Porcine Reproductive and Respiratory Syndrome Virus
KGPGKKKNRKRNPEKPHFPLATEDDVRHH

SEQ ID NO: 403 - protein, 28 aa, Porcine Reproductive and Respiratory Syndrome Virus
KGPGKKKNRKRNPEKPHFPLATEDDVRH

SEQ ID NO: 404 - protein, 29 aa, Porcine Reproductive and Respiratory Syndrome Virus
KGPGKKKNRKRNPEKPHFPLATEDDVRHH

SEQ ID NO: 405 - protein, 17 aa, Porcine Reproductive and Respiratory Syndrome Virus
KGPGKKKNRKRNPEKPH

SEQ ID NO: 406 - protein, 24 aa, Porcine Reproductive and Respiratory Syndrome Virus
KKKNRKRNPEKPHFPLATEDDVRH

SEQ ID NO: 407 - protein, 25 aa, Porcine Reproductive and Respiratory Syndrome Virus
KKKNRKRNPEKPHFPLATEDDVRHH

SEQ ID NO: 408 - protein, 13 aa, Porcine Reproductive and Respiratory Syndrome Virus
KKKNRKRNPEKPH

SEQ ID NO: 409 - protein, 12 aa, Porcine Reproductive and Respiratory Syndrome Virus
KKNRKRNPEKPH

SEQ ID NO: 410 - protein, 23 aa, Porcine Reproductive and Respiratory Syndrome Virus
KKNRKRNPEKPHFPLATEDDVRH

SEQ ID NO: 411 - protein, 24 aa, Porcine Reproductive and Respiratory Syndrome Virus
KKNRKRNPEKPHFPLATEDDVRHH

SEQ ID NO: 412 - protein, 22 aa, Porcine Reproductive and Respiratory Syndrome Virus
KNRKRNPEKPHFPLATEDDVRH

SEQ ID NO: 413 - protein, 23 aa, Porcine Reproductive and Respiratory Syndrome Virus
KNRKRNPEKPHFPLATEDDVRHH

SEQ ID NO: 414 - protein, 11 aa, Porcine Reproductive and Respiratory Syndrome Virus
KNRKRNPEKPH

SEQ ID NO: 415 - protein, 14 aa, Porcine circovirus
MKNKNHYEVIKKTQ

SEQ ID NO: 416 - protein, 10 aa, Porcine circovirus
KNKNHYEVIK

SEQ ID NO: 417 - protein, 11 aa, Porcine circovirus
KNKNHYEVIKK

SEQ ID NO: 418 - protein, 8 aa, Porcine circovirus
KNHYEVIK

SEQ ID NO: 419 - protein, 9 aa, Porcine circovirus
KNHYEVIKK

SEQ ID NO: 420 - protein, 14 aa, Porcine circovirus
MKNKNHYEVIKKTQ

SEQ ID NO: 421 - protein, 96 aa, Porcine circovirus
KKSGPQPHKRWVFTLNNPSEEEKNKIRELPISLFDYFVCGEEGLEEGRTPHLQGFANFAKKQTFNKVKWYFGARCHIEKAKGTDQQNKEYCSKEGH

SEQ ID NO: 422 - protein, 9 aa, Porcine circovirus
KKSGPQPHK

SEQ ID NO: 423 - protein, 51 aa, Porcine circovirus
KKSGPQPHKRWVFTLNNPSEEEKNKIRELPISLFDYFVCGEEGLEEGRTPH

SEQ ID NO: 424 - protein, 50 aa, Porcine circovirus
KSGPQPHKRWVFTLNNPSEEEKNKIRELPISLFDYFVCGEEGLEEGRTPH

SEQ ID NO: 425 - protein, 8 aa, Porcine circovirus
KSGPQPHK

SEQ ID NO: 426 - protein, 38 aa, Porcine circovirus
HLQGFANFAKKQTFNKVKWYFGARCHIEKAKGTDQQNK

SEQ ID NO: 427 - protein, 16 aa, Porcine circovirus
HLQGFANFAKKQTFNK

SEQ ID NO: 428 - protein, 18 aa, Porcine circovirus
HLQGFANFAKKQTFNKVK

SEQ ID NO: 429 - protein, 37 aa, Porcine circovirus
KKQTFNKVKWYFGARCHIEKAKGTDQQNKEYCSKEGH

SEQ ID NO: 430 - protein, 17 aa, Porcine circovirus
KKQTFNKVKWYFGARCH

SEQ ID NO: 431 - protein, 16 aa, Porcine circovirus
KQTFNKVKWYFGARCH

SEQ ID NO: 432 - protein, 36 aa, Porcine circovirus
KQTFNKVKWYFGARCHIEKAKGTDQQNKEYCSKEGH

SEQ ID NO: 433 - protein, 13 aa, Porcine circovirus
HIEKAKGTDQQNK

SEQ ID NO: 434 - protein, 18 aa, Porcine circovirus
KAKGTDQQNKEYCSKEGH

SEQ ID NO: 435 - protein, 16 aa, Porcine circovirus
KGTDQQNKEYCSKEGH

SEQ ID NO: 436 - protein, 12 aa, Porcine circovirus
KMQQRDWKTAVH

SEQ ID NO: 437 - protein, 49 aa, Porcine circovirus
KMQQRDWKTAVHVIVGPPGCGKSQWARNFAEPRDTYWKPSRNKWWDGYH

SEQ ID NO: 438 - protein, 38 aa, Porcine circovirus
HLQGFANFVKKQTFNKVKWYLGARCHIEKAKGTDQQNK

SEQ ID NO: 439 - protein, 11 aa, Porcine circovirus
KNGRSGPQPHK

SEQ ID NO: 440 - protein, 16 aa, Porcine circovirus
HLQGFANFVKKQTFNK

SEQ ID NO: 441 - protein, 18 aa, Porcine circovirus
HLQGFANFVKKQTFNKVK

SEQ ID NO: 442 - protein, 38 aa, Porcine circovirus; identical to SEQ ID NO: 438

SEQ ID NO: 443 - protein, 17 aa, Porcine circovirus
KKQTFNKVKWYLGARCH

SEQ ID NO: 444 - protein, 16 aa, Porcine circovirus
KQTFNKVKWYLGARCH

SEQ ID NO: 445 - protein, 13 aa, Porcine circovirus
HIEKAKGTDQQNK

SEQ ID NO: 446 - protein, 28 aa, Porcine circovirus
HPVTFVRNFRGLAELLKVSGKMQKRDWK

SEQ ID NO: 447 - protein, 24 aa, Porcine circovirus
HPVTFVRNFRGLAELLKVSGKMQK

SEQ ID NO: 448 - protein, 16 aa, Porcine circovirus
KVSGKMQKRDWKTNVH

SEQ ID NO: 449 - protein, 12 aa, Porcine circovirus
KMQKRDWKTNVH

SEQ ID NO: 450 - protein, 49 aa, Porcine circovirus
KMQKRDWKTNVHVIVGPPGCGKSKWAANFADPETTYWKPPRNKWWDGYH

SEQ ID NO: 451 - protein, 38 aa, Porcine circovirus
HLQGFANFVKKQTFNKVKWYFGARCHIEKAKGTDQQNK

SEQ ID NO: 452 - protein, 18 aa, Porcine circovirus
HLQGFANFVKKQTFNKVK

SEQ ID NO: 453 - protein, 38 aa, Porcine circovirus; identical to SEQ ID NO: 451

SEQ ID NO: 454 - protein, 16 aa, Porcine circovirus
HLQGFANFVKKQTFNK

SEQ ID NO: 455 - protein, 17 aa, Porcine circovirus
KKQTFNKVKWYFGARCH

SEQ ID NO: 456 - protein, 16 aa, Porcine circovirus
KQTFNKVKWYFGARCH

SEQ ID NO: 457 - protein, 13 aa, Porcine circovirus
HIEKAKGTDQQNK

SEQ ID NO: 458 - protein, 28 aa, Porcine circovirus
HPVTFVRNFRGLAELLKVSGKMQKRDWK

SEQ ID NO: 459 - protein, 24 aa, Porcine circovirus
HPVTFVRNFRGLAELLKVSGKMQK

SEQ ID NO: 460 - protein, 16 aa, Porcine circovirus
KVSGKMQKRDWKTNVH

SEQ ID NO: 461 - protein, 12 aa, Porcine circovirus
KMQKRDWKTNVH

SEQ ID NO: 462 - protein, 38 aa, Porcine circovirus; identical to SEQ ID NO: 219

SEQ ID NO: 463 - protein, 11 aa, Porcine circovirus
KNGRSGPQPHK

SEQ ID NO: 464 - protein, 16 aa, Porcine circovirus
HLQGFANFVKKQTFNK

SEQ ID NO: 465 - protein, 18 aa, Porcine circovirus
HLQGFANFVKKQTFNKAK

SEQ ID NO: 466 - protein, 38 aa, Porcine circovirus; identical to SEQ ID NO: 219

SEQ ID NO: 467 - protein, 26 aa, Porcine circovirus
KKQTFNKAKWHLGARCHIEKAKGTDH

SEQ ID NO: 468 - protein, 11 aa, Porcine circovirus
KKQTFNKAKWH

SEQ ID NO: 469 - protein, 17 aa, Porcine circovirus
KKQTFNKAKWHLGARCH

SEQ ID NO: 470 - protein, 10 aa, Porcine circovirus
KQTFNKAKWH

SEQ ID NO: 471 - protein, 16 aa, Porcine circovirus
KQTFNKAKWHLGARCH

SEQ ID NO: 472 - protein, 25 aa, Porcine circovirus
KQTFNKAKWHLGARCHIEKAKGTDH

SEQ ID NO: 473 - protein, 19 aa, Porcine circovirus
HLGARCHIEKAKGTDHQNK

SEQ ID NO: 474 - protein, 13 aa, Porcine circovirus
HIEKAKGTDHQNK

SEQ ID NO: 475 - protein, 10 aa, Porcine circovirus
KAKGTDHQNK

SEQ ID NO: 476 - protein, 8 aa, Porcine circovirus
KGTDHQNK

SEQ ID NO: 477 - protein, 28 aa, Porcine circovirus
HPVTFVRNFRGLAELLKVSGKMQKRDWK

SEQ ID NO: 478 - protein, 24 aa, Porcine circovirus
HPVTFVRNFRGLAELLKVSGKMQK

SEQ ID NO: 479 - protein, 16 aa, Porcine circovirus
KVSGKMQKRDWKTNVH

SEQ ID NO: 480 - protein, 12 aa, Porcine circovirus
KMQKRDWKTNVH

SEQ ID NO: 481 - protein, 49 aa, Porcine circovirus
KMQKRDWKTNVHVIVGPPGCGKSKWAANFADPETTYWKPPRNKRWDGYH

SEQ ID NO: 482 - protein, 11 aa, Porcine circovirus
KNGRSGPQPHK

SEQ ID NO: 483 - protein, 16 aa, Porcine circovirus
HLQGFANFVKKQTFNK

SEQ ID NO: 484 - protein, 17 aa, Porcine circovirus
KKQTFNKVKWYLGARCH

SEQ ID NO: 485 - protein, 314 aa, Porcine circovirus
MPSKKNGRSGPQPHKRWVFTLNNPSEDERKKIRELPISLFDYFIVGEEGNEEGRTPHLQGFANFVKKQTFNKVKWYLGARCHIEKAKGTDQQNKEYCSKEGNLLIECGAPRSQGQRSDLSTAVSTLLESGSLVTVAEQHPVTFVRNFRGLAELLKVSGKMQKRDWKTNVHVIVGPPGCGKSKWAANFADPETTYWKPPRNKWWDGYHGEEVVVIDDFYGWLPWDDLLRLCDRYPLTVETKGGTVPFLARSILITSNQTPLEWYSSTAVPAVEALYRRITSLVFWKNVTEQSTEEGGQFVTLSPPCPEFPYEINY

SEQ ID NO: 486 - protein, 11 aa, Porcine circovirus
KNGRSGPQPHK

SEQ ID NO: 487 - protein, 16 aa, Porcine circovirus
HLQGFANFVKKQTFNK

SEQ ID NO: 488 - protein, 18 aa, Porcine circovirus
HLQGFANFVKKQTFNKVK

SEQ ID NO: 489 - protein, 38 aa, Porcine circovirus; identical to SEQ ID NO: 438

SEQ ID NO: 490 - protein, 17 aa, Porcine circovirus
KKQTFNKVKWYLGARCH

SEQ ID NO: 491 - protein, 16 aa, Porcine circovirus
KQTFNKVKWYLGARCH

SEQ ID NO: 492 - protein, 13 aa, Porcine circovirus
HIEKAKGTDQQNK

SEQ ID NO: 493 - protein, 28 aa, Porcine circovirus
HPVTFVRNFRGLAELLKVSGKMQKRDWK

SEQ ID NO: 494 - protein, 24 aa, Porcine circovirus
HPVTFVRNFRGLAELLKVSGKMQK

SEQ ID NO: 495 - protein, 16 aa, Porcine circovirus
KVSGKMQKRDWKTNVH

SEQ ID NO: 496 - protein, 12 aa, Porcine circovirus
KMQKRDWKTNVH

SEQ ID NO: 497 - protein, 49 aa, Porcine circovirus; identical to SEQ ID NO: 450

SEQ ID NO: 498 - protein, 38 aa, Porcine circovirus; identical to SEQ ID NO: 438

SEQ ID NO: 499 - protein, 60 aa, Porcine Reproductive and Respiratory Syndrome Virus; identical to SEQ ID NO: 289

SEQ ID NO: 500 - protein, 48 aa, Porcine Reproductive and Respiratory Syndrome Virus; identical to SEQ ID NO: 395

SEQ ID NO: 501 - protein, 23 aa, Porcine Reproductive and Respiratory Syndrome Virus
KKNMKRNPEKPHFPLATEDDVRH

SEQ ID NO: 502 - protein, 24 aa, Porcine Reproductive and Respiratory Syndrome Virus
KKNMKRNPEKPHFPLATEDDVRHH

SEQ ID NO: 503 - protein, 12 aa, Porcine Reproductive and Respiratory Syndrome Virus
KKNMKRNPEKPH

SEQ ID NO: 504 - protein, 22 aa, Porcine Reproductive and Respiratory Syndrome Virus
KNMKRNPEKPHFPLATEDDVRH

SEQ ID NO: 505 - protein, 23 aa, Porcine Reproductive and Respiratory Syndrome Virus
KNMKRNPEKPHFPLATEDDVRHH

SEQ ID NO: 506 - protein, 11 aa, Porcine Reproductive and Respiratory Syndrome Virus
KNMKRNPEKPH

SEQ ID NO: 507 - protein, 29 aa, Porcine Reproductive and Respiratory Syndrome Virus
KGPGKKKNRKRNPEKPHFPLATEDDVRHH

SEQ ID NO: 508 - protein, 28 aa, Porcine Reproductive and Respiratory Syndrome Virus
KGPGKKKNRKRNPEKPHFPLATEDDVRH

SEQ ID NO: 509 - protein, 29 aa, Porcine Reproductive and Respiratory Syndrome Virus
KGPGKKKNRKRNPEKPHFPLATEDDVRHH

SEQ ID NO: 510 - protein, 17 aa, Porcine Reproductive and Respiratory Syndrome Virus
KGPGKKKNRKRNPEKPH

SEQ ID NO: 511 - protein, 24 aa, Porcine Reproductive and Respiratory Syndrome Virus
KKKNRKRNPEKPHFPLATEDDVRH

SEQ ID NO: 512 - protein, 25 aa, Porcine Reproductive and Respiratory Syndrome Virus
KKKNRKRNPEKPHFPLATEDDVRHH

SEQ ID NO: 513 - protein, 13 aa, Porcine Reproductive and Respiratory Syndrome Virus
KKKNRKRNPEKPH

SEQ ID NO: 514 - protein, 12 aa, Porcine Reproductive and Respiratory Syndrome Virus
KKNRKRNPEKPH

SEQ ID NO: 515 - protein, 23 aa, Porcine Reproductive and Respiratory Syndrome Virus
KKNRKRNPEKPHFPLATEDDVRH

SEQ ID NO: 516 - protein, 24 aa, Porcine Reproductive and Respiratory Syndrome Virus
KKNRKRNPEKPHFPLATEDDVRHH

SEQ ID NO: 517 - protein, 22 aa, Porcine Reproductive and Respiratory Syndrome Virus
KNRKRNPEKPHFPLATEDDVRH

SEQ ID NO: 518 - protein, 23 aa, Porcine Reproductive and Respiratory Syndrome Virus
KNRKRNPEKPHFPLATEDDVRHH

SEQ ID NO: 519 - protein, 11 aa, Porcine Reproductive and Respiratory Syndrome Virus
KNRKRNPEKPH

SEQ ID NO: 520 - protein, 11 aa, Porcine circovirus
KNKNHYEVIKK

SEQ ID NO: 521 - protein, 10 aa, Porcine circovirus
KNKNHYEVIK

SEQ ID NO: 522 - protein, 11 aa, Porcine circovirus
KNKNHYEVIKK

SEQ ID NO: 523 - protein, 8 aa, Porcine circovirus
KNHYEVIK

SEQ ID NO: 524 - protein, 9 aa, Porcine circovirus
KNHYEVIKK

SEQ ID NO: 525 - protein, 38 aa, Porcine circovirus; identical to SEQ ID NO: 219

SEQ ID NO: 526 - protein, 16 aa, Porcine circovirus
HLQGFANFVKKQTFNK

SEQ ID NO: 527 - protein, 18 aa, Porcine circovirus
HLQGFANFVKKQTFNKAK

SEQ ID NO: 528 - protein, 38 aa, Porcine circovirus; identical to SEQ ID NO: 219

SEQ ID NO: 529 - protein, 26 aa, Porcine circovirus
KKQTFNKAKWHLGARCHIEKAKGTDH

SEQ ID NO: 530 - protein, 11 aa, Porcine circovirus
KKQTFNKAKWH

SEQ ID NO: 531 - protein, 17 aa, Porcine circovirus
KKQTFNKAKWHLGARCH

SEQ ID NO: 532 - protein, 10 aa, Porcine circovirus
KQTFNKAKWH

SEQ ID NO: 533 - protein, 16 aa, Porcine circovirus
KQTFNKAKWHLGARCH

SEQ ID NO: 534 - protein, 25 aa, Porcine circovirus
KQTFNKAKWHLGARCHIEKAKGTDH

SEQ ID NO: 535 - protein, 19 aa, Porcine circovirus
HLGARCHIEKAKGTDHQNK

SEQ ID NO: 536 - protein, 13 aa, Porcine circovirus
HIEKAKGTDHQNK

SEQ ID NO: 537 - protein, 10 aa, Porcine circovirus
KAKGTDHQNK

SEQ ID NO: 538 - protein, 8 aa, Porcine circovirus
KGTDHQNK

SEQ ID NO: 539 - protein, 2322 aa, Foot-and-Mouth disease virus; identical to SEQ ID NO: 157

SEQ ID NO: 540 - protein, 85 aa, Foot-and-Mouth Disease virus
HKQKIVAPAKQLLNFDLLKLAGDVESNPGPFFFSDVRANFTKLVDTVNQMQEDMSTKHGPDFNRLVSAFEELAAGVKAIRTGLDE

SEQ ID NO: 541 - protein, 182 aa, Foot-and-Mouth Disease virus; identical to SEQ ID NO: 130

SEQ ID NO: 542 - protein, 14 aa, Equine influenza virus
HKQTVSLKQWLSLK

SEQ ID NO: 543 - protein, 34 aa, Equine influenza virus
HKQTVSLKQWLSLKSPTQESLKTRVLKRWKLFNK

SEQ ID NO: 544 - protein, 22 aa, Equine influenza virus
HKQTVSLKQWLSLKSPTQESLK

SEQ ID NO: 545 - protein, 90 aa, Equine influenza virus
MEREQDTQWTQSTEHINIQKRGNGQQTQRLEHPNLTQSTDHCLTTMSQVDMHKQTVSLKQWLSLKSPTQESLKTRVLKRWKLFNKQEWTS

SEQ ID NO: 546 - protein, 71 aa, Influenza A virus
HINIQKRGNGQQTQRLEHPNLTQSTDHCLTTMSQVDMHKQTVSLKQWLSLKSPTQESLKTRVLKRWKLFNK

SEQ ID NO: 547 - protein, 45 aa, Influenza A virus
HINIQKRGNGQQTQRLEHPNLTQSTDHCLTTMSQVDMHKQTVSLK

SEQ ID NO: 548 - protein, 51 aa, Influenza A virus
HINIQKRGNGQQTQRLEHPNLTQSTDHCLTTMSQVDMHKQTVSLKQWLSLK

SEQ ID NO: 549 - protein, 28 aa, Influenza A virus
HPNLTQSTDHCLTTMSQVDMHKQTVSLK

SEQ ID NO: 550 - protein, 50 aa, Influenza A virus
HPNLTQSTDHCLTTMSQVDMHKQTVSLKQWLSLKSPTQESLKTRVLKRWK

SEQ ID NO: 551 - protein, 34 aa, Influenza A virus
HPNLTQSTDHCLTTMSQVDMHKQTVSLKQWLSLK

SEQ ID NO: 552 - protein, 42 aa, Influenza A virus
HPNLTQSTDHCLTTMSQVDMHKQTVSLKQWLSLKSPTQESLK

SEQ ID NO: 553 - protein, 45 aa, Influenza A virus
HCLTTMSQVDMHKQTVSLKQWLSLKSPTQESLKTRVLKRWKLFNK

SEQ ID NO: 554 - protein, 33 aa, Influenza A virus
HCLTTMSQVDMHKQTVSLKQWLSLKSPTQESLK

SEQ ID NO: 555 - protein, 19 aa, Influenza A virus
HCLTTMSQVDMHKQTVSLK

SEQ ID NO: 556 - protein, 41 aa, Influenza A virus
HCLTTMSQVDMHKQTVSLKQWLSLKSPTQESLKTRVLKRWK

SEQ ID NO: 557 - protein, 25 aa, Influenza A virus
HCLTTMSQVDMHKQTVSLKQWLSLK

SEQ ID NO: 558 - protein, 8 aa, Influenza A virus
HKQTVSLK

SEQ ID NO: 559 - protein, 30 aa, Influenza A virus
HKQTVSLKQWLSLKSPTQESLKTRVLKRWK

SEQ ID NO: 560 - protein, 14 aa, Influenza A virus
HKQTVSLKQWLSLK

SEQ ID NO: 561 - protein, 34 aa, Influenza A virus; identical to SEQ ID NO: 543

SEQ ID NO: 562 - protein, 22 aa, Influenza A virus
HKQTVSLKQWLSLKSPTQESLK

SEQ ID NO: 563 - protein, 90 aa, Equine influenza virus
MEREQDTQWTQSTEHINIQKRGNGQQTQRLEHPNLTQSTDHCLTTMSQVDMHKQTVSLKQWLSLKSPTQCSLKTRVLKRWKLFNKQEWTS

SEQ ID NO: 564 - protein, 71 aa, Equine influenza virus; identical to SEQ ID NO: 546

SEQ ID NO: 565 - protein, 71 aa, Equine influenza virus; identical to SEQ ID NO: 546

SEQ ID NO: 566 - protein, 2322 aa, Foot-and-Mouth Disease virus; identical to SEQ ID NO: 157

SEQ ID NO: 567 - protein, 85 aa, Foot-and-Mouth Disease virus; identical to SEQ ID NO: 540

SEQ ID NO: 568 - protein, 182 aa, Foot-and-Mouth Disease virus; identical to SEQ ID NO: 130

SEQ ID NO: 569 - protein, 11 aa, Porcine circovirus
KNKNHYEVIKK

SEQ ID NO: 570 - protein, 10 aa, Porcine circovirus
KNKNHYEVIK

SEQ ID NO: 571 - protein, 11 aa, Porcine circovirus
KNKNHYEVIKK

SEQ ID NO: 572 - protein, 8 aa, Porcine circovirus
KNHYEVIK

SEQ ID NO: 573 - protein, 9 aa, Porcine circovirus
KNHYEVIKK

SEQ ID NO: 574 - protein, 38 aa, Porcine circovirus; identical to SEQ ID NO: 219

SEQ ID NO: 575 - protein, 16 aa, Porcine circovirus
HLQGFANFVKKQTFNK

SEQ ID NO: 576 - protein, 18 aa, Porcine circovirus
HLQGFANFVKKQTFNKAK

SEQ ID NO: 577 - protein, 38 aa, Porcine circovirus; identical to SEQ ID NO: 219

SEQ ID NO: 578 - protein, 26 aa, Porcine circovirus
KKQTFNKAKWHLGARCHIEKAKGTDH

SEQ ID NO: 579 - protein, 11 aa, Porcine circovirus
KKQTFNKAKWH

SEQ ID NO: 580 - protein, 17 aa, Porcine circovirus
KKQTFNKAKWHLGARCH

SEQ ID NO: 581 - protein, 10 aa, Porcine circovirus
KQTFNKAKWH

SEQ ID NO: 582 - protein, 16 aa, Porcine circovirus
KQTFNKAKWHLGARCH

SEQ ID NO: 583 - protein, 25 aa, Porcine circovirus
KQTFNKAKWHLGARCHIEKAKGTDH

SEQ ID NO: 584 - protein, 19 aa, Porcine circovirus
HLGARCHIEKAKGTDHQNK

SEQ ID NO: 585 - protein, 13 aa, Porcine circovirus
HIEKAKGTDHQNK

SEQ ID NO: 586 - protein, 10 aa, Porcine circovirus
KAKGTDHQNK

SEQ ID NO: 587 - protein, 8 aa, Porcine circovirus
KGTDHQNK

SEQ ID NO: 588 - protein, 29 aa, Goose Influenza virus
KKGTSYPKLSKSYTNNKGKEVLVLWGVHH

SEQ ID NO: 589 - protein, 29 aa, Human influenza virus
KKGSSYPKLSKSYVNNKGKEVLVLWGVHH

SEQ ID NO: 590 - protein, 29 aa, Human influenza virus
KKENSYPKLSKSYVNNKGKEVLVLWGVHH

SEQ ID NO: 591 - protein, 29 aa, Human influenza virus
KKGDSYPKLTNSYVNNKGKEVLVLWGVHH

SEQ ID NO: 592 - protein, 29 aa, Human influenza virus
KKGTSYPKLSKSYTNNKGKEVLVLWGVHH

SEQ ID NO: 593 - protein, 29 aa, Human influenza virus
KKGTSYPKLSKSYTNNKGKEVLVLWGVHH

SEQ ID NO: 594 - protein, 29 aa, Human influenza virus
KKGNSYPKLSKSYTNNKGKEVLVIWGVHH

SEQ ID NO: 595 - protein, 29 aa, Human influenza virus
KKGNSYPKLSKSYTNNKGKEVLVIWGVHH

SEQ ID NO: 596 - protein, 29 aa, Human influenza virus
KKGTSYPKLSKSYTNNKGKEVLVLWGVHH

SEQ ID NO: 597 - protein, 29 aa, Human influenza virus
KKGNSYPKLSKSYTNNKGKEVLVIWGVHH

SEQ ID NO: 598 - protein, 29 aa, Human influenza virus
KKGTSYPKLSKSYTNNKGKEVLVLWGVHH

SEQ ID NO: 599 - protein, 29 aa, Human influenza virus
KKGTSYPKLSKSYTNNKGKEVLVLWGVHH

SEQ ID NO: 600 - protein, 29 aa, Human influenza virus
KKGNSYPKLSKSYTNNKGKEVLVIWGVHH

SEQ ID NO: 601 - protein, 29 aa, Human influenza virus
KKGNSYPKLSKSYTNNKGKEVLVIWGVHH

SEQ ID NO: 602 - protein, 29 aa, Human influenza virus
KKGNSYPKLSKSYTNNKGKEVLVIWGVHH

SEQ ID NO: 603 - protein, 29 aa, Human influenza virus
KKGDSYPKLSKSYTNNKGKEVLVIWGVHH

SEQ ID NO: 604 - protein, 29 aa, Human influenza virus
KKGSSYPKLSKSYVNNKGKEVLVLWGVHH

SEQ ID NO: 605 - protein, 29 aa, Human influenza virus
KKGSSYPKLSKSYVNNKGKEVLVLWGVHH

SEQ ID NO: 606 - protein, 29 aa, Human influenza virus
KKGNSYPKLSKSYTNNKGKEVLVIWGVHH

SEQ ID NO: 607 - protein, 29 aa, Human influenza virus
KKGNSYPKLSKSYTNNKGKEVLVIWGVHH

SEQ ID NO: 608 - protein, 29 aa, Human influenza virus
KKGNSYPKLSKSYTNNKGKEVLVIWGVHH

SEQ ID NO: 609 - protein, 29 aa, Human influenza virus
KKGNSYPKLSKSYTNNKGKEVLVIWGVHH

SEQ ID NO: 610 - protein, 29 aa, Human influenza virus
KKGNSYPKISKSYINNKEKEVLVLWGIHH

SEQ ID NO: 611 - protein, 29 aa, Human influenza virus
KKGNSYPKLSKSYINNKKKEVLVIWGIHH

SEQ ID NO: 612 - protein, 29 aa, Human influenza virus
KKGNSYPKLSKSYINNKGKKVLVLWGIHH

SEQ ID NO: 613 - protein, 29 aa, Human influenza virus
KKGTSYPKLSKSYTNNKKKEVLVLWGVHH

SEQ ID NO: 614 - protein, 28 aa, Human influenza virus
KNGLYPNLSKSYANNKEKEVLVLWGVHH

SEQ ID NO: 615 - protein, 28 aa, Human influenza virus
KNGLYPNLSKSYANNKEKEVLILWGVHH

SEQ ID NO: 616 - protein, 29 aa, Human influenza virus
KKGPNYPVAKRSYNNTSGEQMLIIWGVHH

SEQ ID NO: 617 - protein, 29 aa, Human influenza virus
KKGPNYPVAKRSYNNTSGEQMLIIWGIHH

SEQ ID NO: 618 - protein, 29 aa, Human influenza virus
KKENSYPKLRKSIIINKKEVKLVIWGIHH

SEQ ID NO: 619 - protein, 19 aa, Human influenza virus
KSYKNTRKDPALIIWGIHH

SEQ ID NO: 620 - protein, 29 aa, Human influenza virus
KKNNAYPTIKRTYNNTNVEDLLILWGIHH

SEQ ID NO: 621 - protein, 29 aa, Human influenza virus
KKNNAYPTIKRSYSNTNQEDLLVLWGIHH

SEQ ID NO: 622 - protein, 29 aa, Human influenza virus
KKNNAYPTIKRTYNNTNIEDLLILWGIHH

SEQ ID NO: 623 - protein, 29 aa, Human influenza virus
KKNNAYPTIKRTYNNTNMEDLLILWGIHH

SEQ ID NO: 624 - protein, 29 aa, Human influenza virus
KKGNAYPTIKRTYNNTNVEDLLILWGIHH

SEQ ID NO: 625 - protein, 29 aa, Human influenza virus
KKNNTYPTIKRSYNNTNQEDLLILWGIHH

SEQ ID NO: 626 - protein, 29 aa, Human influenza virus
KKNSAYPTIKRSYNNTNQEDLLVLWGIHH

SEQ ID NO: 627 - protein, 29 aa, Human influenza virus
KKNSAYPTIKRSYNNTNQEDLLVLWGIHH

SEQ ID NO: 628 - protein, 29 aa, Human influenza virus
KKNSAYPTIKRSYNNTNQEDLLVLWGIHH

SEQ ID NO: 629 - protein, 29 aa, Human influenza virus
KKNSAYPTIKRSYNNTNQEDLLVLWGIHH

SEQ ID NO: 630 - protein, 29 aa, Human influenza virus
KKNSAYPTIKRSYNNTNQEDLLVLWGIHH

SEQ ID NO: 631 - protein, 29 aa, Human influenza virus
KKNSAYPTIKRSYNNTNQEDLLVLWGIHH

SEQ ID NO: 632 - protein, 29 aa, Human influenza virus
KKNNAYPTIKRSYNNTNQEDLLVLWGIHH

SEQ ID NO: 633 - protein, 29 aa, Human influenza virus
KKNSAYPTIKRSYNNTNQEDLLVLWGIHH

SEQ ID NO: 634 - protein, 29 aa, Human influenza virus
KKNSTYPTIKRSYNNTNQEDLLVLWGIHH

SEQ ID NO: 635 - protein, 29 aa, Human influenza virus
KKNSTYPTIKRSYNNTNQEDLLVLWGIHH

SEQ ID NO: 636 - protein, 29 aa, Human influenza virus
KKNSTYPTIKRSYNNTNQEDLLVLWGIHH

SEQ ID NO: 637 - protein, 29 aa, Human influenza virus
KKNSTYPTIKRSYNNTNQEDLLVLWGIHH

SEQ ID NO: 638 - protein, 29 aa, Human influenza virus
KKNSTYPTIKRSYNNTNQEDLLVLWGIHH

SEQ ID NO: 639 - protein, 29 aa, Human influenza virus
KKNNAYPTIKRSYNNTNQEDLLVLWGIHH

SEQ ID NO: 640 - protein, 29 aa, Human influenza virus
KKNSTYPTIKRSYNNTNQEDLLVMWGIHH

SEQ ID NO: 641 - protein, 29 aa, Human influenza virus
KKNSAYPTIKRSYNNTNQEDLLVLWGIHH

SEQ ID NO: 642 - protein, 29 aa, Human influenza virus
KKNSTYPTIKRSYNNTNQEDLLVLWGIHH

SEQ ID NO: 643 - protein, 29 aa, Human influenza virus
KKNSTYPTIKRSYNNTNQEDLLVLWGIHH

SEQ ID NO: 644 - protein, 29 aa, Human influenza virus
KKNSTYPTIKRSYNNTNQEDLLVLWGIQH

SEQ ID NO: 645 - protein, 29 aa, Human influenza virus
KKNSAYPIIKRSYNNTNQEDLLVLWGIHH

SEQ ID NO: 646 - protein, 29 aa, Goose influenza virus
  MOD_RES (13)..(13): Variable amino acid
KKNSAYPTIKRSXNNTNHEDLLVLWGIHH

SEQ ID NO: 647 - protein, 29 aa, Human influenza virus
KKNSAYPTIKRSYNNTNQEDLLVLWGIHH

SEQ ID NO: 648 - protein, 29 aa, Turkey influenza virus
KKNNAYPTIKRSYNNTNQEDLLVLWGIHH

SEQ ID NO: 649 - protein, 29 aa, Human influenza virus
KKNNTYPTIKKSYNNTNQEDLLVLWGIHH

SEQ ID NO: 650 - protein, 29 aa, Human influenza virus
KKNSTYPTIKRSYNNTNQEDLLVLWGIHH

SEQ ID NO: 651 - protein, 29 aa, Goose influenza virus
KKGTSYPKLSKSYTNNKGKEVLVLWGVHH

SEQ ID NO: 652 - protein, 29 aa, Pig influenza virus
KKGNSYPKLSKSYTNNKGKEVLVIWGVHH

SEQ ID NO: 653 - protein, 29 aa, Shrimp White Spot Syndrome  Virus
KKNVKSAKQLPHLKVLKKLDVRGAKQLPH

SEQ ID NO: 654 - protein, 28 aa, Shrimp White Spot Syndrome  Virus
KVHLDVKGVKQLLHLKVRLDVRGAKQLH

SEQ ID NO: 655 - protein, 29 aa, Human influenza virus
KKENSYPKLRKSIIINKKEVKLVIWGIHH

SEQ ID NO: 656 - protein, 19 aa, Human influenza virus
KSYKNTRKDPALIIWGIHH

SEQ ID NO: 657 - protein, 29 aa, Human influenza virus
KKGPNYPVAKRSYNNTSGEQMLIIWGVHH

SEQ ID NO: 658 - protein, 29 aa, Human influenza virus
KKGPNYPVAKRSYNNTSGEQMLIIWGIHH

SEQ ID NO: 659 - protein, 29 aa, Human influenza virus
KKNNAYPTIKRTYNNTNVEDLLILWGIHH

SEQ ID NO: 660 - protein, 29 aa, Human influenza virus
KKNNAYPTIKRSYSNTNQEDLLVLWGIHH

SEQ ID NO: 661 - protein, 32 aa, Shrimp Taura syndrome virus
KKVQANKTRVFAASNQGLALALRRYYLSFLDH

SEQ ID NO: 662 - protein, 33 aa, Shrimp Taura syndrome virus
KKACRNAGYKEACLHELDCKSFLLAQQGRAGAH

SEQ ID NO: 663 - protein, 31 aa, Shrimp White Spot Syndrome Virus
KKNVKSAKQLPHLKVHLDVKSAKQLPHLKVH

SEQ ID NO: 664 - protein, 27 aa, Shrimp White Spot Syndrome Virus
KKNVKSAKQLPHLKVHLDVKGVKQLLH

SEQ ID NO: 665 - protein, 27 aa, Shrimp White Spot Syndrome Virus
KKNVKSAKQLPHLKVLLDVRGAKQLPH

SEQ ID NO: 666 - protein, 27 aa, Shrimp White Spot Syndrome Virus
KKNVKSAKQLPHLKVLLDVRGAKQLPH

SEQ ID NO: 667 - protein, 31 aa, Shrimp White Spot Syndrome Virus
KKNVKSAKQLPHLKVLLDVRGAKQLPHLKVH

SEQ ID NO: 668 - protein, 479 aa, Shrimp White Spot Syndrome Virus
MKICQISSPTLTLSIPLEGVYHVKQLLHLKVHLDVKGVKQLLHLKVRLDVRGAKQNPWRKNLCLLKKNVKSAKQLPHLKVHLDVKSAKQLPHLKVHLDVRGAKQLPHLKVRLDVKSAKQLPHLKVHLDVRGAKQLPHLKVRLDVRGAKQNPWRKNLCLLKKNVKSAKQLPHLKVHLDVKGVKQLLHLKVRLDVRGAKQLLHLKVHLDVRGAKQLPHLKVHLDVRGAKQNPWRKNLCLLKKNVKSAKQLPHLKVLLDVRGAKQLPHLKVLLDVRGAKQLPHLKVHLDVRGAKQNPWRKNLCLLKKNVKSAKQLPHLKVLLDVRGAKQLPHLKVLLDVRGAKQLPHLKVHLDVRGAKQLPHLKVLLDVRGAKQLPHLKVLLDVRGAKQNPWRKNLCLLKKNVKSAKQLPHLKVLLDVRGAKQLPHLKVHLDVRGAKQQQQLCLPLKTISTSFTHLLLCLYMEYGKHQNLQVKMWLNITYTS

SEQ ID NO: 669 - protein, 449 aa, Shrimp White Spot Syndrome Virus
HVKQLLHLKVHLDVKGVKQLLHLKVRLDVRGAKQNPWRKNLCLLKKNVKSAKQLPHLKVHLDVKSAKQLPHLKVHLDVRGAKQLPHLKVRLDVKSAKQLPHLKVHLDVRGAKQLPHLKVRLDVRGAKQNPWRKNLCLLKKNVKSAKQLPHLKVHLDVKGVKQLLHLKVRLDVRGAKQLLHLKVHLDVRGAKQLPHLKVHLDVRGAKQNPWRKNLCLLKKNVKSAKQLPHLKVLLDVRGAKQLPHLKVLLDVRGAKQLPHLKVHLDVRGAKQNPWRKNLCLLKKNVKSAKQLPHLKVLLDVRGAKQLPHLKVLLDVRGAKQLPHLKVHLDVRGAKQLPHLKVLLDVRGAKQLPHLKVLLDVRGAKQNPWRKNLCLLKKNVKSAKQLPHLKVLLDVRGAKQLPHLKVHLDVRGAKQQQQLCLPLKTISTSFTHLLLCLYMEYGKHQNLQVK

SEQ ID NO: 670 - protein, 9 aa, Shrimp White Spot Syndrome Virus
HVKQLLHLK

SEQ ID NO: 671 - protein, 15 aa, Shrimp White Spot Syndrome Virus
HVKQLLHLKVHLDVK

SEQ ID NO: 672 - protein, 18 aa, Shrimp White Spot Syndrome Virus
HVKQLLHLKVHLDVKGVK

SEQ ID NO: 673 - protein, 24 aa, Shrimp White Spot Syndrome Virus
HVKQLLHLKVHLDVKGVKQLLHLK

SEQ ID NO: 674 - protein, 33 aa, Shrimp White Spot Syndrome Virus
HVKQLLHLKVHLDVKGVKQLLHLKVRLDVRGAK

SEQ ID NO: 675 - protein, 39 aa, Shrimp White Spot Syndrome Virus
HVKQLLHLKVHLDVKGVKQLLHLKVRLDVRGAKQNPWRK

SEQ ID NO: 676 - protein, 45 aa, Shrimp White Spot Syndrome Virus
HVKQLLHLKVHLDVKGVKQLLHLKVRLDVRGAKQNPWRKNLCLLK

SEQ ID NO: 677 - protein, 46 aa, Shrimp White Spot Syndrome Virus
HVKQLLHLKVHLDVKGVKQLLHLKVRLDVRGAKQNPWRKNLCLLKK

SEQ ID NO: 678 - protein, 49 aa, Shrimp White Spot Syndrome Virus
HVKQLLHLKVHLDVKGVKQLLHLKVRLDVRGAKQNPWRKNLCLLKKNVK

SEQ ID NO: 679 - protein, 7 aa, Shrimp White Spot Syndrome Virus
KQLLHLK

SEQ ID NO: 680 - protein, 9 aa, Shrimp White Spot Syndrome Virus
KQLLHLKVH

SEQ ID NO: 681 - protein, 20 aa, Shrimp White Spot Syndrome Virus
KQLLHLKVHLDVKGVKQLLH

SEQ ID NO: 682 - protein, 9 aa, Shrimp White Spot Syndrome Virus
HLKVHLDVK

SEQ ID NO: 683 - protein, 12 aa, Shrimp White Spot Syndrome Virus
HLKVHLDVKGVK

SEQ ID NO: 684 - protein, 18 aa, Shrimp White Spot Syndrome Virus
HLKVHLDVKGVKQLLHLK

SEQ ID NO: 685 - protein, 27 aa, Shrimp White Spot Syndrome Virus
HLKVHLDVKGVKQLLHLKVRLDVRGAK

SEQ ID NO: 686 - protein, 33 aa, Shrimp White Spot Syndrome Virus
HLKVHLDVKGVKQLLHLKVRLDVRGAKQNPWRK

SEQ ID NO: 687 - protein, 39 aa, Shrimp White Spot Syndrome Virus
HLKVHLDVKGVKQLLHLKVRLDVRGAKQNPWRKNLCLLK

SEQ ID NO: 688 - protein, 40 aa, Shrimp White Spot Syndrome Virus
HLKVHLDVKGVKQLLHLKVRLDVRGAKQNPWRKNLCLLKK

SEQ ID NO: 689 - protein, 43 aa, Shrimp White Spot Syndrome Virus
HLKVHLDVKGVKQLLHLKVRLDVRGAKQNPWRKNLCLLKKNVK

SEQ ID NO: 690 - protein, 46 aa, Shrimp White Spot Syndrome Virus
HLKVHLDVKGVKQLLHLKVRLDVRGAKQNPWRKNLCLLKKNVKSAK

SEQ ID NO: 691 - protein, 48 aa, Shrimp White Spot Syndrome Virus
KVHLDVKGVKQLLHLKVRLDVRGAKQNPWRKNLCLLKKNVKSAKQLPH

SEQ ID NO: 692 - protein, 7 aa, Shrimp White Spot Syndrome Virus
KVHLDVK

SEQ ID NO: 693 - protein, 10 aa, Shrimp White Spot Syndrome Virus
KVHLDVKGVK

SEQ ID NO: 694 - protein, 14 aa, Shrimp White Spot Syndrome Virus
KVHLDVKGVKQLLH

SEQ ID NO: 695 - protein, 14 aa, Shrimp White Spot Syndrome Virus
HLDVKGVKQLLHLK

SEQ ID NO: 696 - protein, 23 aa, Shrimp White Spot Syndrome Virus
HLDVKGVKQLLHLKVRLDVRGAK

SEQ ID NO: 697 - protein, 29 aa, Shrimp White Spot Syndrome Virus
HLDVKGVKQLLHLKVRLDVRGAKQNPWRK

SEQ ID NO: 698 - protein, 35 aa, Shrimp White Spot Syndrome Virus
HLDVKGVKQLLHLKVRLDVRGAKQNPWRKNLCLLK

SEQ ID NO: 699 - protein, 36 aa, Shrimp White Spot Syndrome Virus
HLDVKGVKQLLHLKVRLDVRGAKQNPWRKNLCLLKK

SEQ ID NO: 700 - protein, 39 aa, Shrimp White Spot Syndrome Virus
HLDVKGVKQLLHLKVRLDVRGAKQNPWRKNLCLLKKNVK

SEQ ID NO: 701 - protein, 42 aa, Shrimp White Spot Syndrome Virus
HLDVKGVKQLLHLKVRLDVRGAKQNPWRKNLCLLKKNVKSAK

SEQ ID NO: 702 - protein, 48 aa, Shrimp White Spot Syndrome Virus
HLDVKGVKQLLHLKVRLDVRGAKQNPWRKNLCLLKKNVKSAKQLPHLK

SEQ ID NO: 703 - protein, 10 aa, Shrimp White Spot Syndrome Virus
KGVKQLLHLK

SEQ ID NO: 704 - protein, 42 aa, Shrimp White Spot Syndrome Virus
KGVKQLLHLKVRLDVRGAKQNPWRKNLCLLKKNVKSAKQLPH

SEQ ID NO: 705 - protein, 46 aa, Shrimp White Spot Syndrome Virus
KGVKQLLHLKVRLDVRGAKQNPWRKNLCLLKKNVKSAKQLPHLKVH

SEQ ID NO: 706 - protein, 7 aa, Shrimp White Spot Syndrome Virus
KQLLHLK

SEQ ID NO: 707 - protein, 39 aa, Shrimp White Spot Syndrome Virus
KQLLHLKVRLDVRGAKQNPWRKNLCLLKKNVKSAKQLPH

SEQ ID NO: 708 - protein, 43 aa, Shrimp White Spot Syndrome Virus
KQLLHLKVRLDVRGAKQNPWRKNLCLLKKNVKSAKQLPHLKVH

SEQ ID NO: 709 - protein, 12 aa, Shrimp White Spot Syndrome Virus
HLKVRLDVRGAK

SEQ ID NO: 710 - protein, 18 aa, Shrimp White Spot Syndrome Virus
HLKVRLDVRGAKQNPWRK

SEQ ID NO: 711 - protein, 24 aa, Shrimp White Spot Syndrome Virus
HLKVRLDVRGAKQNPWRKNLCLLK

SEQ ID NO: 712 - protein, 25 aa, Shrimp White Spot Syndrome Virus
HLKVRLDVRGAKQNPWRKNLCLLKK

SEQ ID NO: 713 - protein, 28 aa, Shrimp White Spot Syndrome Virus
HLKVRLDVRGAKQNPWRKNLCLLKKNVK

SEQ ID NO: 714 - protein, 31 aa, Shrimp White Spot Syndrome Virus
HLKVRLDVRGAKQNPWRKNLCLLKKNVKSAK

SEQ ID NO: 715 - protein, 37 aa, Shrimp White Spot Syndrome Virus
HLKVRLDVRGAKQNPWRKNLCLLKKNVKSAKQLPHLK

SEQ ID NO: 716 - protein, 43 aa, Shrimp White Spot Syndrome Virus
HLKVRLDVRGAKQNPWRKNLCLLKKNVKSAKQLPHLKVHLDVK

SEQ ID NO: 717 - protein, 46 aa, Shrimp White Spot Syndrome Virus
HLKVRLDVRGAKQNPWRKNLCLLKKNVKSAKQLPHLKVHLDVKSAK

SEQ ID NO: 718 - protein, 33 aa, Shrimp White Spot Syndrome Virus
KVRLDVRGAKQNPWRKNLCLLKKNVKSAKQLPH

SEQ ID NO: 719 - protein, 37 aa, Shrimp White Spot Syndrome Virus
KVRLDVRGAKQNPWRKNLCLLKKNVKSAKQLPHLKVH

SEQ ID NO: 720 - protein, 48 aa, Shrimp White Spot Syndrome Virus
KVRLDVRGAKQNPWRKNLCLLKKNVKSAKQLPHLKVHLDVKSAKQLPH

SEQ ID NO: 721 - protein, 24 aa, Shrimp White Spot Syndrome Virus
KQNPWRKNLCLLKKNVKSAKQLPH

SEQ ID NO: 722 - protein, 28 aa, Shrimp White Spot Syndrome Virus
KQNPWRKNLCLLKKNVKSAKQLPHLKVH

SEQ ID NO: 723 - protein, 39 aa, Shrimp White Spot Syndrome Virus
KQNPWRKNLCLLKKNVKSAKQLPHLKVHLDVKSAKQLPH

SEQ ID NO: 724 - protein, 43 aa, Shrimp White Spot Syndrome Virus
KQNPWRKNLCLLKKNVKSAKQLPHLKVHLDVKSAKQLPHLKVH

SEQ ID NO: 725 - protein, 48 aa, Shrimp White Spot Syndrome Virus
KNLCLLKKNVKSAKQLPHLKVHLDVKSAKQLPHLKVHLDVRGAKQLPH

SEQ ID NO: 726 - protein, 18 aa, Shrimp White Spot Syndrome Virus
KNLCLLKKNVKSAKQLPH

SEQ ID NO: 727 - protein, 22 aa, Shrimp White Spot Syndrome Virus
KNLCLLKKNVKSAKQLPHLKVH

SEQ ID NO: 728 - protein, 33 aa, Shrimp White Spot Syndrome Virus
KNLCLLKKNVKSAKQLPHLKVHLDVKSAKQLPH

SEQ ID NO: 729 - protein, 37 aa, Shrimp White Spot Syndrome Virus
KNLCLLKKNVKSAKQLPHLKVHLDVKSAKQLPHLKVH

SEQ ID NO: 730 - protein, 12 aa, Shrimp White Spot Syndrome Virus
KKNVKSAKQLPH

SEQ ID NO: 731 - protein, 16 aa, Shrimp White Spot Syndrome Virus
KKNVKSAKQLPHLKVH

SEQ ID NO: 732 - protein, 27 aa, Shrimp White Spot Syndrome Virus
KKNVKSAKQLPHLKVHLDVKSAKQLPH

SEQ ID NO: 733 - protein, 31 aa, Shrimp White Spot Syndrome Virus; identical to SEQ ID NO: 663

SEQ ID NO: 734 - protein, 42 aa, Shrimp White Spot Syndrome Virus
KKNVKSAKQLPHLKVHLDVKSAKQLPHLKVHLDVRGAKQLPH

SEQ ID NO: 735 - protein, 11 aa, Shrimp White Spot Syndrome Virus
KNVKSAKQLPH

SEQ ID NO: 736 - protein, 15 aa, Shrimp White Spot Syndrome Virus
KNVKSAKQLPHLKVH

SEQ ID NO: 737 - protein, 26 aa, Shrimp White Spot Syndrome Virus
KNVKSAKQLPHLKVHLDVKSAKQLPH

SEQ ID NO: 738 - protein, 30 aa, Shrimp White Spot Syndrome Virus
KNVKSAKQLPHLKVHLDVKSAKQLPHLKVH

SEQ ID NO: 739 - protein, 41 aa, Shrimp White Spot Syndrome Virus
KNVKSAKQLPHLKVHLDVKSAKQLPHLKVHLDVRGAKQLPH

SEQ ID NO: 740 - protein, 38 aa, Shrimp White Spot Syndrome Virus
KSAKQLPHLKVHLDVKSAKQLPHLKVHLDVRGAKQLPH

SEQ ID NO: 741 - protein, 10 aa, Shrimp White Spot Syndrome Virus
KSAKQLPHLK

SEQ ID NO: 742 - protein, 12 aa, Shrimp White Spot Syndrome Virus
KSAKQLPHLKVH

SEQ ID NO: 743 - protein, 23 aa, Shrimp White Spot Syndrome Virus
KSAKQLPHLKVHLDVKSAKQLPH

SEQ ID NO: 744 - protein, 27 aa, Shrimp White Spot Syndrome Virus
KSAKQLPHLKVHLDVKSAKQLPHLKVH

SEQ ID NO: 745 - protein, 7 aa, Shrimp White Spot Syndrome Virus
KQLPHLK

SEQ ID NO: 746 - protein, 9 aa, Shrimp White Spot Syndrome Virus
KQLPHLKVH

SEQ ID NO: 747 - protein, 35 aa, Shrimp White Spot Syndrome Virus
KQLPHLKVHLDVKSAKQLPHLKVHLDVRGAKQLPH

SEQ ID NO: 748 - protein, 20 aa, Shrimp White Spot Syndrome Virus
KQLPHLKVHLDVKSAKQLPH

SEQ ID NO: 749 - protein, 24 aa, Shrimp White Spot Syndrome Virus
KQLPHLKVHLDVKSAKQLPHLKVH

SEQ ID NO: 750 - protein, 50 aa, Shrimp White Spot Syndrome Virus
KQLPHLKVHLDVKSAKQLPHLKVHLDVRGAKQLPHLKVRLDVKSAKQLPH

SEQ ID NO: 751 - protein, 9 aa, Shrimp White Spot Syndrome Virus
HLKVHLDVK

SEQ ID NO: 752 - protein, 12 aa, Shrimp White Spot Syndrome Virus
HLKVHLDVKSAK

SEQ ID NO: 753 - protein, 18 aa, Shrimp White Spot Syndrome Virus
HLKVHLDVKSAKQLPHLK

SEQ ID NO: 754 - protein, 27 aa, Shrimp White Spot Syndrome Virus
HLKVHLDVKSAKQLPHLKVHLDVRGAK

SEQ ID NO: 755 - protein, 33 aa, Shrimp White Spot Syndrome Virus
HLKVHLDVKSAKQLPHLKVHLDVRGAKQLPHLK

SEQ ID NO: 756 - protein, 39 aa, Shrimp White Spot Syndrome Virus
HLKVHLDVKSAKQLPHLKVHLDVRGAKQLPHLKVRLDVK

SEQ ID NO: 757 - protein, 42 aa, Shrimp White Spot Syndrome Virus
HLKVHLDVKSAKQLPHLKVHLDVRGAKQLPHLKVRLDVKSAK

SEQ ID NO: 758 - protein, 48 aa, Shrimp White Spot Syndrome Virus
HLKVHLDVKSAKQLPHLKVHLDVRGAKQLPHLKVRLDVKSAKQLPHLK

SEQ ID NO: 759 - protein, 29 aa, Shrimp White Spot Syndrome Virus
KVHLDVKSAKQLPHLKVHLDVRGAKQLPH

SEQ ID NO: 760 - protein, 44 aa, Shrimp White Spot Syndrome Virus
KVHLDVKSAKQLPHLKVHLDVRGAKQLPHLKVRLDVKSAKQLPH

SEQ ID NO: 761 - protein, 48 aa, Shrimp White Spot Syndrome Virus
KVHLDVKSAKQLPHLKVHLDVRGAKQLPHLKVRLDVKSAKQLPHLKVH

SEQ ID NO: 762 - protein, 7 aa, Shrimp White Spot Syndrome Virus
KVHLDVK

SEQ ID NO: 763 - protein, 10 aa, Shrimp White Spot Syndrome Virus
KVHLDVKSAK

SEQ ID NO: 764 - protein, 14 aa, Shrimp White Spot Syndrome Virus
KVHLDVKSAKQLPH

SEQ ID NO: 765 - protein, 18 aa, Shrimp White Spot Syndrome Virus
KVHLDVKSAKQLPHLKVH

SEQ ID NO: 766 - protein, 14 aa, Shrimp White Spot Syndrome Virus
HLDVKSAKQLPHLK

SEQ ID NO: 767 - protein, 23 aa, Shrimp White Spot Syndrome Virus
HLDVKSAKQLPHLKVHLDVRGAK

SEQ ID NO: 768 - protein, 29 aa, Shrimp White Spot Syndrome Virus
HLDVKSAKQLPHLKVHLDVRGAKQLPHLK

SEQ ID NO: 769 - protein, 35 aa, Shrimp White Spot Syndrome Virus
HLDVKSAKQLPHLKVHLDVRGAKQLPHLKVRLDVK

SEQ ID NO: 770 - protein, 38 aa, Shrimp White Spot Syndrome Virus
HLDVKSAKQLPHLKVHLDVRGAKQLPHLKVRLDVKSAK

SEQ ID NO: 771 - protein, 44 aa, Shrimp White Spot Syndrome Virus
HLDVKSAKQLPHLKVHLDVRGAKQLPHLKVRLDVKSAKQLPHLK

SEQ ID NO: 772 - protein, 23 aa, Shrimp White Spot Syndrome Virus
KSAKQLPHLKVHLDVRGAKQLPH

SEQ ID NO: 773 - protein, 38 aa, Shrimp White Spot Syndrome Virus
KSAKQLPHLKVHLDVRGAKQLPHLKVRLDVKSAKQLPH

SEQ ID NO: 774 - protein, 42 aa, Shrimp White Spot Syndrome Virus
KSAKQLPHLKVHLDVRGAKQLPHLKVRLDVKSAKQLPHLKVH

SEQ ID NO: 775 - protein, 10 aa, Shrimp White Spot Syndrome Virus
KSAKQLPHLK

SEQ ID NO: 776 - protein, 12 aa, Shrimp White Spot Syndrome Virus
KSAKQLPHLKVH

SEQ ID NO: 777 - protein, 20 aa, Shrimp White Spot Syndrome Virus
KQLPHLKVHLDVRGAKQLPH

SEQ ID NO: 778 - protein, 35 aa, Shrimp White Spot Syndrome Virus
KQLPHLKVHLDVRGAKQLPHLKVRLDVKSAKQLPH

SEQ ID NO: 779 - protein, 39 aa, Shrimp White Spot Syndrome Virus
KQLPHLKVHLDVRGAKQLPHLKVRLDVKSAKQLPHLKVH

SEQ ID NO: 780 - protein, 7 aa, Shrimp White Spot Syndrome Virus
KQLPHLK

SEQ ID NO: 781 - protein, 9 aa, Shrimp White Spot Syndrome Virus
KQLPHLKVH

SEQ ID NO: 782 - protein, 50 aa, Shrimp White Spot Syndrome Virus
KQLPHLKVHLDVRGAKQLPHLKVRLDVKSAKQLPHLKVHLDVRGAKQLPH

SEQ ID NO: 783 - protein, 24 aa, Shrimp White Spot Syndrome Virus
HLKVHLDVRGAKQLPHLKVRLDVK

SEQ ID NO: 784 - protein, 27 aa, Shrimp White Spot Syndrome Virus
HLKVHLDVRGAKQLPHLKVRLDVKSAK

SEQ ID NO: 785 - protein, 33 aa, Shrimp White Spot Syndrome Virus
HLKVHLDVRGAKQLPHLKVRLDVKSAKQLPHLK

SEQ ID NO: 786 - protein, 42 aa, Shrimp White Spot Syndrome Virus
HLKVHLDVRGAKQLPHLKVRLDVKSAKQLPHLKVHLDVRGAK

SEQ ID NO: 787 - protein, 48 aa, Shrimp White Spot Syndrome Virus
HLKVHLDVRGAKQLPHLKVRLDVKSAKQLPHLKVHLDVRGAKQLPHLK

SEQ ID NO: 788 - protein, 12 aa, Shrimp White Spot Syndrome Virus
HLKVHLDVRGAK

SEQ ID NO: 789 - protein, 18 aa, Shrimp White Spot Syndrome Virus
HLKVHLDVRGAKQLPHLK

SEQ ID NO: 790 - protein, 10 aa, Shrimp White Spot Syndrome Virus
KVHLDVRGAK

SEQ ID NO: 791 - protein, 14 aa, Shrimp White Spot Syndrome Virus
KVHLDVRGAKQLPH

SEQ ID NO: 792 - protein, 29 aa, Shrimp White Spot Syndrome Virus
KVHLDVRGAKQLPHLKVRLDVKSAKQLPH

SEQ ID NO: 793 - protein, 33 aa, Shrimp White Spot Syndrome Virus
KVHLDVRGAKQLPHLKVRLDVKSAKQLPHLKVH

SEQ ID NO: 794 - protein, 44 aa, Shrimp White Spot Syndrome Virus
KVHLDVRGAKQLPHLKVRLDVKSAKQLPHLKVHLDVRGAKQLPH

SEQ ID NO: 795 - protein, 14 aa, Shrimp White Spot Syndrome Virus
HLDVRGAKQLPHLK

SEQ ID NO: 796 - protein, 20 aa, Shrimp White Spot Syndrome Virus
HLDVRGAKQLPHLKVRLDVK

SEQ ID NO: 797 - protein, 23 aa, Shrimp White Spot Syndrome Virus
HLDVRGAKQLPHLKVRLDVKSAK

SEQ ID NO: 798 - protein, 29 aa, Shrimp White Spot Syndrome Virus
HLDVRGAKQLPHLKVRLDVKSAKQLPHLK

SEQ ID NO: 799 - protein, 38 aa, Shrimp White Spot Syndrome Virus
HLDVRGAKQLPHLKVRLDVKSAKQLPHLKVHLDVRGAK

SEQ ID NO: 800 - protein, 44 aa, Shrimp White Spot Syndrome Virus
HLDVRGAKQLPHLKVRLDVKSAKQLPHLKVHLDVRGAKQLPHLK

SEQ ID NO: 801 - protein, 7 aa, Shrimp White Spot Syndrome Virus
KQLPHLK

SEQ ID NO: 802 - protein, 20 aa, Shrimp White Spot Syndrome Virus
KQLPHLKVRLDVKSAKQLPH

SEQ ID NO: 803 - protein, 24 aa, Shrimp White Spot Syndrome Virus
KQLPHLKVRLDVKSAKQLPHLKVH

SEQ ID NO: 804 - protein, 35 aa, Shrimp White Spot Syndrome Virus
KQLPHLKVRLDVKSAKQLPHLKVHLDVRGAKQLPH

SEQ ID NO: 805 - protein, 9 aa, Shrimp White Spot Syndrome Virus
HLKVRLDVK

SEQ ID NO: 806 - protein, 12 aa, Shrimp White Spot Syndrome Virus
HLKVRLDVKSAK

SEQ ID NO: 807 - protein, 18 aa, Shrimp White Spot Syndrome Virus
HLKVRLDVKSAKQLPHLK

SEQ ID NO: 808 - protein, 27 aa, Shrimp White Spot Syndrome Virus
HLKVRLDVKSAKQLPHLKVHLDVRGAK

SEQ ID NO: 809 - protein, 33 aa, Shrimp White Spot Syndrome Virus
HLKVRLDVKSAKQLPHLKVHLDVRGAKQLPHLK

SEQ ID NO: 810 - protein, 42 aa, Shrimp White Spot Syndrome Virus
HLKVRLDVKSAKQLPHLKVHLDVRGAKQLPHLKVRLDVRGAK

SEQ ID NO: 811 - protein, 48 aa, Shrimp White Spot Syndrome Virus
HLKVRLDVKSAKQLPHLKVHLDVRGAKQLPHLKVRLDVRGAKQNPWRK

SEQ ID NO: 812 - protein, 14 aa, Shrimp White Spot Syndrome Virus
KVRLDVKSAKQLPH

SEQ ID NO: 813 - protein, 18 aa, Shrimp White Spot Syndrome Virus
KVRLDVKSAKQLPHLKVH

SEQ ID NO: 814 - protein, 29 aa, Shrimp White Spot Syndrome Virus
KVRLDVKSAKQLPHLKVHLDVRGAKQLPH

SEQ ID NO: 815 - protein, 10 aa, Shrimp White Spot Syndrome Virus
KSAKQLPHLK

SEQ ID NO: 816 - protein, 12 aa, Shrimp White Spot Syndrome Virus
KSAKQLPHLKVH

SEQ ID NO: 817 - protein, 23 aa, Shrimp White Spot Syndrome Virus
KSAKQLPHLKVHLDVRGAKQLPH

SEQ ID NO: 818 - protein, 7 aa, Shrimp White Spot Syndrome Virus
KQLPHLK

SEQ ID NO: 819 - protein, 9 aa, Shrimp White Spot Syndrome Virus
KQLPHLKVH

SEQ ID NO: 820 - protein, 20 aa, Shrimp White Spot Syndrome Virus
KQLPHLKVHLDVRGAKQLPH

SEQ ID NO: 821 - protein, 12 aa, Shrimp White Spot Syndrome Virus
HLKVHLDVRGAK

SEQ ID NO: 822 - protein, 18 aa, Shrimp White Spot Syndrome Virus
HLKVHLDVRGAKQLPHLK

SEQ ID NO: 823 - protein, 27 aa, Shrimp White Spot Syndrome Virus
HLKVHLDVRGAKQLPHLKVRLDVRGAK

SEQ ID NO: 824 - protein, 33 aa, Shrimp White Spot Syndrome Virus
HLKVHLDVRGAKQLPHLKVRLDVRGAKQNPWRK

SEQ ID NO: 825 - protein, 39 aa, Shrimp White Spot Syndrome Virus
HLKVHLDVRGAKQLPHLKVRLDVRGAKQNPWRKNLCLLK

SEQ ID NO: 826 - protein, 40 aa, Shrimp White Spot Syndrome Virus
HLKVHLDVRGAKQLPHLKVRLDVRGAKQNPWRKNLCLLKK

SEQ ID NO: 827 - protein, 43 aa, Shrimp White Spot Syndrome Virus
HLKVHLDVRGAKQLPHLKVRLDVRGAKQNPWRKNLCLLKKNVK

SEQ ID NO: 828 - protein, 46 aa, Shrimp White Spot Syndrome Virus
HLKVHLDVRGAKQLPHLKVRLDVRGAKQNPWRKNLCLLKKNVKSAK

SEQ ID NO: 829 - protein, 10 aa, Shrimp White Spot Syndrome Virus
KVHLDVRGAK

SEQ ID NO: 830 - protein, 14 aa, Shrimp White Spot Syndrome Virus
KVHLDVRGAKQLPH

SEQ ID NO: 831 - protein, 48 aa, Shrimp White Spot Syndrome Virus
KVHLDVRGAKQLPHLKVRLDVRGAKQNPWRKNLCLLKKNVKSAKQLPH

SEQ ID NO: 832 - protein, 14 aa, Shrimp White Spot Syndrome Virus
HLDVRGAKQLPHLK

SEQ ID NO: 833 - protein, 23 aa, Shrimp White Spot Syndrome Virus
HLDVRGAKQLPHLKVRLDVRGAK

SEQ ID NO: 834 - protein, 29 aa, Shrimp White Spot Syndrome Virus
HLDVRGAKQLPHLKVRLDVRGAKQNPWRK

SEQ ID NO: 835 - protein, 35 aa, Shrimp White Spot Syndrome Virus
HLDVRGAKQLPHLKVRLDVRGAKQNPWRKNLCLLK

SEQ ID NO: 836 - protein, 36 aa, Shrimp White Spot Syndrome Virus
HLDVRGAKQLPHLKVRLDVRGAKQNPWRKNLCLLKK

SEQ ID NO: 837 - protein, 39 aa, Shrimp White Spot Syndrome Virus
HLDVRGAKQLPHLKVRLDVRGAKQNPWRKNLCLLKKNVK

SEQ ID NO: 838 - protein, 42 aa, Shrimp White Spot Syndrome Virus
HLDVRGAKQLPHLKVRLDVRGAKQNPWRKNLCLLKKNVKSAK

SEQ ID NO: 839 - protein, 48 aa, Shrimp White Spot Syndrome Virus
HLDVRGAKQLPHLKVRLDVRGAKQNPWRKNLCLLKKNVKSAKQLPHLK

SEQ ID NO: 840 - protein, 43 aa, Shrimp White Spot Syndrome Virus
KQLPHLKVRLDVRGAKQNPWRKNLCLLKKNVKSAKQLPHLKVH

SEQ ID NO: 841 - protein, 7 aa, Shrimp White Spot Syndrome Virus
KQLPHLK

SEQ ID NO: 842 - protein, 39 aa, Shrimp White Spot Syndrome Virus
KQLPHLKVRLDVRGAKQNPWRKNLCLLKKNVKSAKQLPH

SEQ ID NO: 843 - protein, 12 aa, Shrimp White Spot Syndrome Virus
HLKVRLDVRGAK

SEQ ID NO: 844 - protein, 18 aa, Shrimp White Spot Syndrome Virus
HLKVRLDVRGAKQNPWRK

SEQ ID NO: 845 - protein, 24 aa, Shrimp White Spot Syndrome Virus
HLKVRLDVRGAKQNPWRKNLCLLK

SEQ ID NO: 846 - protein, 25 aa, Shrimp White Spot Syndrome Virus
HLKVRLDVRGAKQNPWRKNLCLLKK

SEQ ID NO: 847 - protein, 28 aa, Shrimp White Spot Syndrome Virus
HLKVRLDVRGAKQNPWRKNLCLLKKNVK

SEQ ID NO: 848 - protein, 31 aa, Shrimp White Spot Syndrome Virus; identical to SEQ ID NO: 714

SEQ ID NO: 849 - protein, 37 aa, Shrimp White Spot Syndrome Virus; identical to SEQ ID NO: 715

SEQ ID NO: 850 - protein, 43 aa, Shrimp White Spot Syndrome Virus; identical to SEQ ID NO: 716

SEQ ID NO: 851 - protein, 46 aa, Shrimp White Spot Syndrome Virus
HLKVRLDVRGAKQNPWRKNLCLLKKNVKSAKQLPHLKVHLDVKGVK

SEQ ID NO: 852 - protein, 33 aa, Shrimp White Spot Syndrome Virus; identical to SEQ ID NO: 718

SEQ ID NO: 853 - protein, 37 aa, Shrimp White Spot Syndrome Virus; identical to SEQ ID NO: 719

SEQ ID NO: 854 - protein, 48 aa, Shrimp White Spot Syndrome Virus
KVRLDVRGAKQNPWRKNLCLLKKNVKSAKQLPHLKVHLDVKGVKQLLH

SEQ ID NO: 855 - protein, 24 aa, Shrimp White Spot Syndrome Virus
KQNPWRKNLCLLKKNVKSAKQLPH

SEQ ID NO: 856 - protein, 28 aa, Shrimp White Spot Syndrome Virus
KQNPWRKNLCLLKKNVKSAKQLPHLKVH

SEQ ID NO: 857 - protein, 39 aa, Shrimp White Spot Syndrome Virus
KQNPWRKNLCLLKKNVKSAKQLPHLKVHLDVKGVKQLLH

SEQ ID NO: 858 - protein, 48 aa, Shrimp White Spot Syndrome Virus
KNLCLLKKNVKSAKQLPHLKVHLDVKGVKQLLHLKVRLDVRGAKQLLH

SEQ ID NO: 859 - protein, 18 aa, Shrimp White Spot Syndrome Virus
KNLCLLKKNVKSAKQLPH

SEQ ID NO: 860 - protein, 22 aa, Shrimp White Spot Syndrome Virus
KNLCLLKKNVKSAKQLPHLKVH

SEQ ID NO: 861 - protein, 33 aa, Shrimp White Spot Syndrome Virus
KNLCLLKKNVKSAKQLPHLKVHLDVKGVKQLLH

SEQ ID NO: 862 - protein, 12 aa, Shrimp White Spot Syndrome Virus
KKNVKSAKQLPH

SEQ ID NO: 863 - protein, 16 aa, Shrimp White Spot Syndrome Virus
KKNVKSAKQLPHLKVH

SEQ ID NO: 864 - protein, 27 aa, Shrimp White Spot Syndrome Virus
KKNVKSAKQLPHLKVHLDVKGVKQLLH

SEQ ID NO: 865 - protein, 42 aa, Shrimp White Spot Syndrome Virus
KKNVKSAKQLPHLKVHLDVKGVKQLLHLKVRLDVRGAKQLLH

SEQ ID NO: 866 - protein, 46 aa, Shrimp White Spot Syndrome Virus
KKNVKSAKQLPHLKVHLDVKGVKQLLHLKVRLDVRGAKQLLHLKVH

SEQ ID NO: 867 - protein, 11 aa, Shrimp White Spot Syndrome Virus
KNVKSAKQLPH

SEQ ID NO: 868 - protein, 15 aa, Shrimp White Spot Syndrome Virus
KNVKSAKQLPHLKVH

SEQ ID NO: 869 - protein, 26 aa, Shrimp White Spot Syndrome Virus
KNVKSAKQLPHLKVHLDVKGVKQLLH

SEQ ID NO: 870 - protein, 41 aa, Shrimp White Spot Syndrome Virus
KNVKSAKQLPHLKVHLDVKGVKQLLHLKVRLDVRGAKQLLH

SEQ ID NO: 871 - protein, 45 aa, Shrimp White Spot Syndrome Virus
KNVKSAKQLPHLKVHLDVKGVKQLLHLKVRLDVRGAKQLLHLKVH

SEQ ID NO: 872 - protein, 10 aa, Shrimp White Spot Syndrome Virus
KSAKQLPHLK

SEQ ID NO: 873 - protein, 12 aa, Shrimp White Spot Syndrome Virus
KSAKQLPHLKVH

SEQ ID NO: 874 - protein, 23 aa, Shrimp White Spot Syndrome Virus
KSAKQLPHLKVHLDVKGVKQLLH

SEQ ID NO: 875 - protein, 38 aa, Shrimp White Spot Syndrome Virus
KSAKQLPHLKVHLDVKGVKQLLHLKVRLDVRGAKQLLH

SEQ ID NO: 876 - protein, 42 aa, Shrimp White Spot Syndrome Virus
KSAKQLPHLKVHLDVKGVKQLLHLKVRLDVRGAKQLLHLKVH

SEQ ID NO: 877 - protein, 7 aa, Shrimp White Spot Syndrome Virus
KQLPHLK

SEQ ID NO: 878 - protein, 9 aa, Shrimp White Spot Syndrome Virus
KQLPHLKVH

SEQ ID NO: 879 - protein, 20 aa, Shrimp White Spot Syndrome Virus
KQLPHLKVHLDVKGVKQLLH

SEQ ID NO: 880 - protein, 35 aa, Shrimp White Spot Syndrome Virus
KQLPHLKVHLDVKGVKQLLHLKVRLDVRGAKQLLH

SEQ ID NO: 881 - protein, 39 aa, Shrimp White Spot Syndrome Virus
KQLPHLKVHLDVKGVKQLLHLKVRLDVRGAKQLLHLKVH

SEQ ID NO: 882 - protein, 50 aa, Shrimp White Spot Syndrome Virus
KQLPHLKVHLDVKGVKQLLHLKVRLDVRGAKQLLHLKVHLDVRGAKQLPH

SEQ ID NO: 883 - protein, 9 aa, Shrimp White Spot Syndrome Virus
HLKVHLDVK

SEQ ID NO: 884 - protein, 12 aa, Shrimp White Spot Syndrome Virus
HLKVHLDVKGVK

SEQ ID NO: 885 - protein, 18 aa, Shrimp White Spot Syndrome Virus
HLKVHLDVKGVKQLLHLK

SEQ ID NO: 886 - protein, 33 aa, Shrimp White Spot Syndrome Virus
HLKVHLDVKGVKQLLHLKVRLDVRGAKQLLHLK

SEQ ID NO: 887 - protein, 27 aa, Shrimp White Spot Syndrome Virus
HLKVHLDVKGVKQLLHLKVRLDVRGAK

SEQ ID NO: 888 - protein, 42 aa, Shrimp White Spot Syndrome Virus
HLKVHLDVKGVKQLLHLKVRLDVRGAKQLLHLKVHLDVRGAK

SEQ ID NO: 889 - protein, 48 aa, Shrimp White Spot Syndrome Virus
HLKVHLDVKGVKQLLHLKVRLDVRGAKQLLHLKVHLDVRGAKQLPHLK

SEQ ID NO: 890 - protein, 7 aa, Shrimp White Spot Syndrome Virus
KVHLDVK

SEQ ID NO: 891 - protein, 10 aa, Shrimp White Spot Syndrome Virus
KVHLDVKGVK

SEQ ID NO: 892 - protein, 14 aa, Shrimp White Spot Syndrome Virus
KVHLDVKGVKQLLH

SEQ ID NO: 893 - protein, 29 aa, Shrimp White Spot Syndrome Virus
KVHLDVKGVKQLLHLKVRLDVRGAKQLLH

SEQ ID NO: 894 - protein, 33 aa, Shrimp White Spot Syndrome Virus
KVHLDVKGVKQLLHLKVRLDVRGAKQLLHLKVH

SEQ ID NO: 895 - protein, 44 aa, Shrimp White Spot Syndrome Virus
KVHLDVKGVKQLLHLKVRLDVRGAKQLLHLKVHLDVRGAKQLPH

SEQ ID NO: 896 - protein, 48 aa, Shrimp White Spot Syndrome Virus
KVHLDVKGVKQLLHLKVRLDVRGAKQLLHLKVHLDVRGAKQLPHLKVH

SEQ ID NO: 897 - protein, 38 aa, Shrimp White Spot Syndrome Virus
HLDVKGVKQLLHLKVRLDVRGAKQLLHLKVHLDVRGAK

SEQ ID NO: 898 - protein, 44 aa, Shrimp White Spot Syndrome Virus
HLDVKGVKQLLHLKVRLDVRGAKQLLHLKVHLDVRGAKQLPHLK

SEQ ID NO: 899 - protein, 14 aa, Shrimp White Spot Syndrome Virus
HLDVKGVKQLLHLK

SEQ ID NO: 900 - protein, 29 aa, Shrimp White Spot Syndrome Virus
HLDVKGVKQLLHLKVRLDVRGAKQLLHLK

SEQ ID NO: 901 - protein, 23 aa, Shrimp White Spot Syndrome Virus
HLDVKGVKQLLHLKVRLDVRGAK

SEQ ID NO: 902 - protein, 10 aa, Shrimp White Spot Syndrome Virus
KGVKQLLHLK

SEQ ID NO: 903 - protein, 23 aa, Shrimp White Spot Syndrome Virus
KGVKQLLHLKVRLDVRGAKQLLH

SEQ ID NO: 904 - protein, 27 aa, Shrimp White Spot Syndrome Virus
KGVKQLLHLKVRLDVRGAKQLLHLKVH

SEQ ID NO: 905 - protein, 38 aa, Shrimp White Spot Syndrome Virus
KGVKQLLHLKVRLDVRGAKQLLHLKVHLDVRGAKQLPH

SEQ ID NO: 906 - protein, 42 aa, Shrimp White Spot Syndrome Virus
KGVKQLLHLKVRLDVRGAKQLLHLKVHLDVRGAKQLPHLKVH

SEQ ID NO: 907 - protein, 7 aa, Shrimp White Spot Syndrome Virus
KQLLHLK

SEQ ID NO: 908 - protein, 20 aa, Shrimp White Spot Syndrome Virus
KQLLHLKVRLDVRGAKQLLH

SEQ ID NO: 909 - protein, 24 aa, Shrimp White Spot Syndrome Virus
KQLLHLKVRLDVRGAKQLLHLKVH

SEQ ID NO: 910 - protein, 35 aa, Shrimp White Spot Syndrome Virus
KQLLHLKVRLDVRGAKQLLHLKVHLDVRGAKQLPH

SEQ ID NO: 911 - protein, 39 aa, Shrimp White Spot Syndrome Virus
KQLLHLKVRLDVRGAKQLLHLKVHLDVRGAKQLPHLKVH

SEQ ID NO: 912 - protein, 18 aa, Shrimp White Spot Syndrome Virus
HLKVRLDVRGAKQLLHLK

SEQ ID NO: 913 - protein, 12 aa, Shrimp White Spot Syndrome Virus
HLKVRLDVRGAK

SEQ ID NO: 914 - protein, 27 aa, Shrimp White Spot Syndrome Virus
HLKVRLDVRGAKQLLHLKVHLDVRGAK

SEQ ID NO: 915 - protein, 33 aa, Shrimp White Spot Syndrome Virus
HLKVRLDVRGAKQLLHLKVHLDVRGAKQLPHLK

SEQ ID NO: 916 - protein, 42 aa, Shrimp White Spot Syndrome Virus
HLKVRLDVRGAKQLLHLKVHLDVRGAKQLPHLKVHLDVRGAK

SEQ ID NO: 917 - protein, 48 aa, Shrimp White Spot Syndrome Virus
HLKVRLDVRGAKQLLHLKVHLDVRGAKQLPHLKVHLDVRGAKQNPWRK

SEQ ID NO: 918 - protein, 14 aa, Shrimp White Spot Syndrome Virus
KVRLDVRGAKQLLH

SEQ ID NO: 919 - protein, 18 aa, Shrimp White Spot Syndrome Virus
KVRLDVRGAKQLLHLKVH

SEQ ID NO: 920 - protein, 29 aa, Shrimp White Spot Syndrome Virus
KVRLDVRGAKQLLHLKVHLDVRGAKQLPH

SEQ ID NO: 921 - protein, 33 aa, Shrimp White Spot Syndrome Virus
KVRLDVRGAKQLLHLKVHLDVRGAKQLPHLKVH

SEQ ID NO: 922 - protein, 7 aa, Shrimp White Spot Syndrome Virus
KQLLHLK

SEQ ID NO: 923 - protein, 9 aa, Shrimp White Spot Syndrome Virus
KQLLHLKVH

SEQ ID NO: 924 - protein, 20 aa, Shrimp White Spot Syndrome Virus
KQLLHLKVHLDVRGAKQLPH

SEQ ID NO: 925 - protein, 24 aa, Shrimp White Spot Syndrome Virus
KQLLHLKVHLDVRGAKQLPHLKVH

SEQ ID NO: 926 - protein, 12 aa, Shrimp White Spot Syndrome Virus
HLKVHLDVRGAK

SEQ ID NO: 927 - protein, 18 aa, Shrimp White Spot Syndrome Virus
HLKVHLDVRGAKQLPHLK

SEQ ID NO: 928 - protein, 27 aa, Shrimp White Spot Syndrome Virus
HLKVHLDVRGAKQLPHLKVHLDVRGAK

SEQ ID NO: 929 - protein, 33 aa, Shrimp White Spot Syndrome Virus
HLKVHLDVRGAKQLPHLKVHLDVRGAKQNPWRK

SEQ ID NO: 930 - protein, 39 aa, Shrimp White Spot Syndrome Virus
HLKVHLDVRGAKQLPHLKVHLDVRGAKQNPWRKNLCLLK

SEQ ID NO: 931 - protein, 40 aa, Shrimp White Spot Syndrome Virus
HLKVHLDVRGAKQLPHLKVHLDVRGAKQNPWRKNLCLLKK

SEQ ID NO: 932 - protein, 43 aa, Shrimp White Spot Syndrome Virus
HLKVHLDVRGAKQLPHLKVHLDVRGAKQNPWRKNLCLLKKNVK

SEQ ID NO: 933 - protein, 46 aa, Shrimp White Spot Syndrome Virus
HLKVHLDVRGAKQLPHLKVHLDVRGAKQNPWRKNLCLLKKNVKSAK

SEQ ID NO: 934 - protein, 10 aa, Shrimp White Spot Syndrome Virus
KVHLDVRGAK

SEQ ID NO: 935 - protein, 14 aa, Shrimp White Spot Syndrome Virus
KVHLDVRGAKQLPH

SEQ ID NO: 936 - protein, 18 aa, Shrimp White Spot Syndrome Virus
KVHLDVRGAKQLPHLKVH

SEQ ID NO: 937 - protein, 48 aa, Shrimp White Spot Syndrome Virus
KVHLDVRGAKQLPHLKVHLDVRGAKQNPWRKNLCLLKKNVKSAKQLPH

SEQ ID NO: 938 - protein, 14 aa, Shrimp White Spot Syndrome Virus
HLDVRGAKQLPHLK

SEQ ID NO: 939 - protein, 23 aa, Shrimp White Spot Syndrome Virus
HLDVRGAKQLPHLKVHLDVRGAK

SEQ ID NO: 940 - protein, 29 aa, Shrimp White Spot Syndrome Virus
HLDVRGAKQLPHLKVHLDVRGAKQNPWRK

SEQ ID NO: 941 - protein, 35 aa, Shrimp White Spot Syndrome Virus
HLDVRGAKQLPHLKVHLDVRGAKQNPWRKNLCLLK

SEQ ID NO: 942 - protein, 36 aa, Shrimp White Spot Syndrome Virus
HLDVRGAKQLPHLKVHLDVRGAKQNPWRKNLCLLKK

SEQ ID NO: 943 - protein, 39 aa, Shrimp White Spot Syndrome Virus
HLDVRGAKQLPHLKVHLDVRGAKQNPWRKNLCLLKKNVK

SEQ ID NO: 944 - protein, 42 aa, Shrimp White Spot Syndrome Virus
HLDVRGAKQLPHLKVHLDVRGAKQNPWRKNLCLLKKNVKSAK

SEQ ID NO: 945 - protein, 48 aa, Shrimp White Spot Syndrome Virus
HLDVRGAKQLPHLKVHLDVRGAKQNPWRKNLCLLKKNVKSAKQLPHLK

SEQ ID NO: 946 - protein, 7 aa, Shrimp White Spot Syndrome Virus
KQLPHLK

SEQ ID NO: 947 - protein, 9 aa, Shrimp White Spot Syndrome Virus
KQLPHLKVH

SEQ ID NO: 948 - protein, 39 aa, Shrimp White Spot Syndrome Virus
KQLPHLKVHLDVRGAKQNPWRKNLCLLKKNVKSAKQLPH

SEQ ID NO: 949 - protein, 12 aa, Shrimp White Spot Syndrome Virus
HLKVHLDVRGAK

SEQ ID NO: 950 - protein, 18 aa, Shrimp White Spot Syndrome Virus
HLKVHLDVRGAKQNPWRK

SEQ ID NO: 951 - protein, 24 aa, Shrimp White Spot Syndrome Virus
HLKVHLDVRGAKQNPWRKNLCLLK

SEQ ID NO: 952 - protein, 25 aa, Shrimp White Spot Syndrome Virus
HLKVHLDVRGAKQNPWRKNLCLLKK

SEQ ID NO: 953 - protein, 28 aa, Shrimp White Spot Syndrome Virus
HLKVHLDVRGAKQNPWRKNLCLLKKNVK

SEQ ID NO: 954 - protein, 31 aa, Shrimp White Spot Syndrome Virus
HLKVHLDVRGAKQNPWRKNLCLLKKNVKSAK

SEQ ID NO: 955 - protein, 37 aa, Shrimp White Spot Syndrome Virus
HLKVHLDVRGAKQNPWRKNLCLLKKNVKSAKQLPHLK

SEQ ID NO: 956 - protein, 46 aa, Shrimp White Spot Syndrome Virus
HLKVHLDVRGAKQNPWRKNLCLLKKNVKSAKQLPHLKVLLDVRGAK

SEQ ID NO: 957 - protein, 33 aa, Shrimp White Spot Syndrome Virus
KVHLDVRGAKQNPWRKNLCLLKKNVKSAKQLPH

SEQ ID NO: 958 - protein, 48 aa, Shrimp White Spot Syndrome Virus
KVHLDVRGAKQNPWRKNLCLLKKNVKSAKQLPHLKVLLDVRGAKQLPH

SEQ ID NO: 959 - protein, 10 aa, Shrimp White Spot Syndrome Virus
KVHLDVRGAK

SEQ ID NO: 960 - protein, 14 aa, Shrimp White Spot Syndrome Virus
HLDVRGAKQNPWRK

SEQ ID NO: 961 - protein, 20 aa, Shrimp White Spot Syndrome Virus
HLDVRGAKQNPWRKNLCLLK

SEQ ID NO: 962 - protein, 21 aa, Shrimp White Spot Syndrome Virus
HLDVRGAKQNPWRKNLCLLKK

SEQ ID NO: 963 - protein, 24 aa, Shrimp White Spot Syndrome Virus
HLDVRGAKQNPWRKNLCLLKKNVK

SEQ ID NO: 964 - protein, 27 aa, Shrimp White Spot Syndrome Virus
HLDVRGAKQNPWRKNLCLLKKNVKSAK

SEQ ID NO: 965 - protein, 33 aa, Shrimp White Spot Syndrome Virus
HLDVRGAKQNPWRKNLCLLKKNVKSAKQLPHLK

SEQ ID NO: 966 - protein, 42 aa, Shrimp White Spot Syndrome Virus
HLDVRGAKQNPWRKNLCLLKKNVKSAKQLPHLKVLLDVRGAK

SEQ ID NO: 967 - protein, 48 aa, Shrimp White Spot Syndrome Virus
HLDVRGAKQNPWRKNLCLLKKNVKSAKQLPHLKVLLDVRGAKQLPHLK

SEQ ID NO: 968 - protein, 24 aa, Shrimp White Spot Syndrome Virus
KQNPWRKNLCLLKKNVKSAKQLPH

SEQ ID NO: 969 - protein, 39 aa, Shrimp White Spot Syndrome Virus
KQNPWRKNLCLLKKNVKSAKQLPHLKVLLDVRGAKQLPH

SEQ ID NO: 970 - protein, 18 aa, Shrimp White Spot Syndrome Virus
KNLCLLKKNVKSAKQLPH

SEQ ID NO: 971 - protein, 33 aa, Shrimp White Spot Syndrome Virus
KNLCLLKKNVKSAKQLPHLKVLLDVRGAKQLPH

SEQ ID NO: 972 - protein, 48 aa, Shrimp White Spot Syndrome Virus
KNLCLLKKNVKSAKQLPHLKVLLDVRGAKQLPHLKVLLDVRGAKQLPH

SEQ ID NO: 973 - protein, 27 aa, Shrimp White Spot Syndrome Virus
KKNVKSAKQLPHLKVLLDVRGAKQLPH

SEQ ID NO: 974 - protein, 42 aa, Shrimp White Spot Syndrome Virus
KKNVKSAKQLPHLKVLLDVRGAKQLPHLKVLLDVRGAKQLPH

SEQ ID NO: 975 - protein, 46 aa, Shrimp White Spot Syndrome Virus
KKNVKSAKQLPHLKVLLDVRGAKQLPHLKVLLDVRGAKQLPHLKVH

SEQ ID NO: 976 - protein, 12 aa, Shrimp White Spot Syndrome Virus
KKNVKSAKQLPH

SEQ ID NO: 977 - protein, 11 aa, Shrimp White Spot Syndrome Virus
KNVKSAKQLPH

SEQ ID NO: 978 - protein, 26 aa, Shrimp White Spot Syndrome Virus
KNVKSAKQLPHLKVLLDVRGAKQLPH

SEQ ID NO: 979 - protein, 41 aa, Shrimp White Spot Syndrome Virus
KNVKSAKQLPHLKVLLDVRGAKQLPHLKVLLDVRGAKQLPH

SEQ ID NO: 980 - protein, 45 aa, Shrimp White Spot Syndrome Virus
KNVKSAKQLPHLKVLLDVRGAKQLPHLKVLLDVRGAKQLPHLKVH

SEQ ID NO: 981 - protein, 10 aa, Shrimp White Spot Syndrome Virus
KSAKQLPHLK

SEQ ID NO: 982 - protein, 23 aa, Shrimp White Spot Syndrome Virus
KSAKQLPHLKVLLDVRGAKQLPH

SEQ ID NO: 983 - protein, 38 aa, Shrimp White Spot Syndrome Virus
KSAKQLPHLKVLLDVRGAKQLPHLKVLLDVRGAKQLPH

SEQ ID NO: 984 - protein, 42 aa, Shrimp White Spot Syndrome Virus
KSAKQLPHLKVLLDVRGAKQLPHLKVLLDVRGAKQLPHLKVH

SEQ ID NO: 985 - protein, 7 aa, Shrimp White Spot Syndrome Virus
KQLPHLK

SEQ ID NO: 986 - protein, 20 aa, Shrimp White Spot Syndrome Virus
KQLPHLKVLLDVRGAKQLPH

SEQ ID NO: 987 - protein, 35 aa, Shrimp White Spot Syndrome Virus
KQLPHLKVLLDVRGAKQLPHLKVLLDVRGAKQLPH

SEQ ID NO: 988 - protein, 39 aa, Shrimp White Spot Syndrome Virus
KQLPHLKVLLDVRGAKQLPHLKVLLDVRGAKQLPHLKVH

SEQ ID NO: 989 - protein, 12 aa, Shrimp White Spot Syndrome Virus
HLKVLLDVRGAK

SEQ ID NO: 990 - protein, 18 aa, Shrimp White Spot Syndrome Virus
HLKVLLDVRGAKQLPHLK

SEQ ID NO: 991 - protein, 27 aa, Shrimp White Spot Syndrome Virus
HLKVLLDVRGAKQLPHLKVLLDVRGAK

SEQ ID NO: 992 - protein, 33 aa, Shrimp White Spot Syndrome Virus
HLKVLLDVRGAKQLPHLKVLLDVRGAKQLPHLK

SEQ ID NO: 993 - protein, 42 aa, Shrimp White Spot Syndrome Virus
HLKVLLDVRGAKQLPHLKVLLDVRGAKQLPHLKVHLDVRGAK

SEQ ID NO: 994 - protein, 48 aa, Shrimp White Spot Syndrome Virus
HLKVLLDVRGAKQLPHLKVLLDVRGAKQLPHLKVHLDVRGAKQNPWRK

SEQ ID NO: 995 - protein, 14 aa, Shrimp White Spot Syndrome Virus
KVLLDVRGAKQLPH

SEQ ID NO: 996 - protein, 29 aa, Shrimp White Spot Syndrome Virus
KVLLDVRGAKQLPHLKVLLDVRGAKQLPH

SEQ ID NO: 997 - protein, 33 aa, Shrimp White Spot Syndrome Virus
KVLLDVRGAKQLPHLKVLLDVRGAKQLPHLKVH

SEQ ID NO: 998 - protein, 20 aa, Shrimp White Spot Syndrome Virus
KQLPHLKVLLDVRGAKQLPH

SEQ ID NO: 999 - protein, 24 aa, Shrimp White Spot Syndrome Virus
KQLPHLKVLLDVRGAKQLPHLKVH

SEQ ID NO: 1000 - protein, 7 aa, Shrimp White Spot Syndrome Virus
KQLPHLK

SEQ ID NO: 1001 - protein, 12 aa, Shrimp White Spot Syndrome Virus
HLKVLLDVRGAK

SEQ ID NO: 1002 - protein, 18 aa, Shrimp White Spot Syndrome Virus
HLKVLLDVRGAKQLPHLK

SEQ ID NO: 1003 - protein, 27 aa, Shrimp White Spot Syndrome Virus
HLKVLLDVRGAKQLPHLKVHLDVRGAK

SEQ ID NO: 1004 - protein, 39 aa, Shrimp White Spot Syndrome Virus
HLKVLLDVRGAKQLPHLKVHLDVRGAKQNPWRKNLCLLK

SEQ ID NO: 1005 - protein, 40 aa, Shrimp White Spot Syndrome Virus
HLKVLLDVRGAKQLPHLKVHLDVRGAKQNPWRKNLCLLKK

SEQ ID NO: 1006 - protein, 43 aa, Shrimp White Spot Syndrome Virus
HLKVLLDVRGAKQLPHLKVHLDVRGAKQNPWRKNLCLLKKNVK

SEQ ID NO: 1007 - protein, 33 aa, Shrimp White Spot Syndrome Virus
HLKVLLDVRGAKQLPHLKVHLDVRGAKQNPWRK

SEQ ID NO: 1008 - protein, 46 aa, Shrimp White Spot Syndrome Virus
HLKVLLDVRGAKQLPHLKVHLDVRGAKQNPWRKNLCLLKKNVKSAK

SEQ ID NO: 1009 - protein, 14 aa, Shrimp White Spot Syndrome Virus
KVLLDVRGAKQLPH

SEQ ID NO: 1010 - protein, 18 aa, Shrimp White Spot Syndrome Virus
KVLLDVRGAKQLPHLKVH

SEQ ID NO: 1011 - protein, 48 aa, Shrimp White Spot Syndrome Virus
KVLLDVRGAKQLPHLKVHLDVRGAKQNPWRKNLCLLKKNVKSAKQLPH

SEQ ID NO: 1012 - protein, 7 aa, Shrimp White Spot Syndrome Virus
KQLPHLK

SEQ ID NO: 1013 - protein, 9 aa, Shrimp White Spot Syndrome Virus
KQLPHLKVH

SEQ ID NO: 1014 - protein, 39 aa, Shrimp White Spot Syndrome Virus; identical to SEQ ID NO: 948

SEQ ID NO: 1015 - protein, 12 aa, Shrimp White Spot Syndrome Virus
HLKVHLDVRGAK

SEQ ID NO: 1016 - protein, 24 aa, Shrimp White Spot Syndrome Virus
HLKVHLDVRGAKQNPWRKNLCLLK

SEQ ID NO: 1017 - protein, 25 aa, Shrimp White Spot Syndrome Virus
HLKVHLDVRGAKQNPWRKNLCLLKK

SEQ ID NO: 1018 - protein, 28 aa, Shrimp White Spot Syndrome Virus
HLKVHLDVRGAKQNPWRKNLCLLKKNVK

SEQ ID NO: 1019 - protein, 18 aa, Shrimp White Spot Syndrome Virus
HLKVHLDVRGAKQNPWRK

SEQ ID NO: 1020 - protein, 31 aa, Shrimp White Spot Syndrome Virus; identical to SEQ ID NO: 954

SEQ ID NO: 1021 - protein, 37 aa, Shrimp White Spot Syndrome Virus; identical to SEQ ID NO: 955

SEQ ID NO: 1022 - protein, 46 aa, Shrimp White Spot Syndrome Virus; identical to SEQ ID NO: 956

SEQ ID NO: 1023 - protein, 33 aa, Shrimp White Spot Syndrome Virus; identical to SEQ ID NO: 957

SEQ ID NO: 1024 - protein, 48 aa, Shrimp White Spot Syndrome Virus; identical to SEQ ID NO: 958

SEQ ID NO: 1025 - protein, 10 aa, Shrimp White Spot Syndrome Virus
KVHLDVRGAK

SEQ ID NO: 1026 - protein, 20 aa, Shrimp White Spot Syndrome Virus
HLDVRGAKQNPWRKNLCLLK

SEQ ID NO: 1027 - protein, 21 aa, Shrimp White Spot Syndrome Virus
HLDVRGAKQNPWRKNLCLLKK

SEQ ID NO: 1028 - protein, 24 aa, Shrimp White Spot Syndrome Virus
HLDVRGAKQNPWRKNLCLLKKNVK

SEQ ID NO: 1029 - protein, 14 aa, Shrimp White Spot Syndrome Virus
HLDVRGAKQNPWRK

SEQ ID NO: 1030 - protein, 27 aa, Shrimp White Spot Syndrome Virus
HLDVRGAKQNPWRKNLCLLKKNVKSAK

SEQ ID NO: 1031 - protein, 33 aa, Shrimp White Spot Syndrome Virus; identical to SEQ ID NO: 965

SEQ ID NO: 1032 - protein, 42 aa, Shrimp White Spot Syndrome Virus; identical to SEQ ID NO: 966

SEQ ID NO: 1033 - protein, 48 aa, Shrimp White Spot Syndrome Virus; identical to SEQ ID NO: 967

SEQ ID NO: 1034 - protein, 24 aa, Shrimp White Spot Syndrome Virus
KQNPWRKNLCLLKKNVKSAKQLPH

SEQ ID NO: 1035 - protein, 39 aa, Shrimp White Spot Syndrome Virus; identical to SEQ ID NO: 969

SEQ ID NO: 1036 - protein, 18 aa, Shrimp White Spot Syndrome Virus
KNLCLLKKNVKSAKQLPH

SEQ ID NO: 1037 - protein, 33 aa, Shrimp White Spot Syndrome Virus; identical to SEQ ID NO: 971

SEQ ID NO: 1038 - protein, 48 aa, Shrimp White Spot Syndrome Virus; identical to SEQ ID NO: 972

SEQ ID NO: 1039 - protein, 12 aa, Shrimp White Spot Syndrome Virus
KKNVKSAKQLPH

SEQ ID NO: 1040 - protein, 27 aa, Shrimp White Spot Syndrome Virus
KKNVKSAKQLPHLKVLLDVRGAKQLPH

SEQ ID NO: 1041 - protein, 42 aa, Shrimp White Spot Syndrome Virus; identical to SEQ ID NO: 974

SEQ ID NO: 1042 - protein, 46 aa, Shrimp White Spot Syndrome Virus; identical to SEQ ID NO: 975

SEQ ID NO: 1043 - protein, 26 aa, Shrimp White Spot Syndrome Virus
KNVKSAKQLPHLKVLLDVRGAKQLPH

SEQ ID NO: 1044 - protein, 41 aa, Shrimp White Spot Syndrome Virus; identical to SEQ ID NO: 979

SEQ ID NO: 1045 - protein, 45 aa, Shrimp White Spot Syndrome Virus; identical to SEQ ID NO: 980

SEQ ID NO: 1046 - protein, 11 aa, Shrimp White Spot Syndrome Virus
KNVKSAKQLPH

SEQ ID NO: 1047 - protein, 10 aa, Shrimp White Spot Syndrome Virus
KSAKQLPHLK

SEQ ID NO: 1048 - protein, 23 aa, Shrimp White Spot Syndrome Virus
KSAKQLPHLKVLLDVRGAKQLPH

SEQ ID NO: 1049 - protein, 38 aa, Shrimp White Spot Syndrome Virus; identical to SEQ ID NO: 983

SEQ ID NO: 1050 - protein, 42 aa, Shrimp White Spot Syndrome Virus; identical to SEQ ID NO: 984

SEQ ID NO: 1051 - protein, 7 aa, Shrimp White Spot Syndrome Virus
KQLPHLK

SEQ ID NO: 1052 - protein, 20 aa, Shrimp White Spot Syndrome Virus
KQLPHLKVLLDVRGAKQLPH

SEQ ID NO: 1053 - protein, 35 aa, Shrimp White Spot Syndrome Virus; identical to SEQ ID NO: 987

SEQ ID NO: 1054 - protein, 39 aa, Shrimp White Spot Syndrome Virus; identical to SEQ ID NO: 988

SEQ ID NO: 1055 - protein, 50 aa, Shrimp White Spot Syndrome Virus
KQLPHLKVLLDVRGAKQLPHLKVLLDVRGAKQLPHLKVHLDVRGAKQLPH

SEQ ID NO: 1056 - protein, 12 aa, Shrimp White Spot Syndrome Virus
HLKVLLDVRGAK

SEQ ID NO: 1057 - protein, 18 aa, Shrimp White Spot Syndrome Virus
HLKVLLDVRGAKQLPHLK

SEQ ID NO: 1058 - protein, 27 aa, Shrimp White Spot Syndrome Virus
HLKVLLDVRGAKQLPHLKVLLDVRGAK

SEQ ID NO: 1059 - protein, 33 aa, Shrimp White Spot Syndrome Virus; identical to SEQ ID NO: 992

SEQ ID NO: 1060 - protein, 42 aa, Shrimp White Spot Syndrome Virus; identical to SEQ ID NO: 993

SEQ ID NO: 1061 - protein, 48 aa, Shrimp White Spot Syndrome Virus
HLKVLLDVRGAKQLPHLKVLLDVRGAKQLPHLKVHLDVRGAKQLPHLK

SEQ ID NO: 1062 - protein, 44 aa, Shrimp White Spot Syndrome Virus
KVLLDVRGAKQLPHLKVLLDVRGAKQLPHLKVHLDVRGAKQLPH

SEQ ID NO: 1063 - protein, 14 aa, Shrimp White Spot Syndrome Virus
KVLLDVRGAKQLPH

SEQ ID NO: 1064 - protein, 29 aa, Shrimp White Spot Syndrome Virus
KVLLDVRGAKQLPHLKVLLDVRGAKQLPH

SEQ ID NO: 1065 - protein, 33 aa, Shrimp White Spot Syndrome Virus; identical to SEQ ID NO: 997

SEQ ID NO: 1066 - protein, 20 aa, Shrimp White Spot Syndrome Virus
KQLPHLKVLLDVRGAKQLPH

SEQ ID NO: 1067 - protein, 24 aa, Shrimp White Spot Syndrome Virus
KQLPHLKVLLDVRGAKQLPHLKVH

SEQ ID NO: 1068 - protein, 35 aa, Shrimp White Spot Syndrome Virus
KQLPHLKVLLDVRGAKQLPHLKVHLDVRGAKQLPH

SEQ ID NO: 1069 - protein, 50 aa, Shrimp White Spot Syndrome Virus
KQLPHLKVLLDVRGAKQLPHLKVHLDVRGAKQLPHLKVLLDVRGAKQLPH

SEQ ID NO: 1070 - protein, 7 aa, Shrimp White Spot Syndrome Virus
KQLPHLK

SEQ ID NO: 1071 - protein, 12 aa, Shrimp White Spot Syndrome Virus
HLKVLLDVRGAK

SEQ ID NO: 1072 - protein, 18 aa, Shrimp White Spot Syndrome Virus
HLKVLLDVRGAKQLPHLK

SEQ ID NO: 1073 - protein, 27 aa, Shrimp White Spot Syndrome Virus
HLKVLLDVRGAKQLPHLKVHLDVRGAK

SEQ ID NO: 1074 - protein, 33 aa, Shrimp White Spot Syndrome Virus
HLKVLLDVRGAKQLPHLKVHLDVRGAKQLPHLK

SEQ ID NO: 1075 - protein, 42 aa, Shrimp White Spot Syndrome Virus
HLKVLLDVRGAKQLPHLKVHLDVRGAKQLPHLKVLLDVRGAK

SEQ ID NO: 1076 - protein, 48 aa, Shrimp White Spot Syndrome Virus
HLKVLLDVRGAKQLPHLKVHLDVRGAKQLPHLKVLLDVRGAKQLPHLK

SEQ ID NO: 1077 - protein, 14 aa, Shrimp White Spot Syndrome Virus
KVLLDVRGAKQLPH

SEQ ID NO: 1078 - protein, 18 aa, Shrimp White Spot Syndrome Virus
KVLLDVRGAKQLPHLKVH

SEQ ID NO: 1079 - protein, 29 aa, Shrimp White Spot Syndrome Virus
KVLLDVRGAKQLPHLKVHLDVRGAKQLPH

SEQ ID NO: 1080 - protein, 44 aa, Shrimp White Spot Syndrome Virus
KVLLDVRGAKQLPHLKVHLDVRGAKQLPHLKVLLDVRGAKQLPH

SEQ ID NO: 1081 - protein, 7 aa, Shrimp White Spot Syndrome Virus
KQLPHLK

SEQ ID NO: 1082 - protein, 9 aa, Shrimp White Spot Syndrome Virus
KQLPHLKVH

SEQ ID NO: 1083 - protein, 20 aa, Shrimp White Spot Syndrome Virus
KQLPHLKVHLDVRGAKQLPH

SEQ ID NO: 1084 - protein, 35 aa, Shrimp White Spot Syndrome Virus
KQLPHLKVHLDVRGAKQLPHLKVLLDVRGAKQLPH

SEQ ID NO: 1085 - protein, 12 aa, Shrimp White Spot Syndrome Virus
HLKVHLDVRGAK

SEQ ID NO: 1086 - protein, 18 aa, Shrimp White Spot Syndrome Virus
HLKVHLDVRGAKQLPHLK

SEQ ID NO: 1087 - protein, 27 aa, Shrimp White Spot Syndrome Virus
HLKVHLDVRGAKQLPHLKVLLDVRGAK

SEQ ID NO: 1088 - protein, 33 aa, Shrimp White Spot Syndrome Virus
HLKVHLDVRGAKQLPHLKVLLDVRGAKQLPHLK

SEQ ID NO: 1089 - protein, 42 aa, Shrimp White Spot Syndrome Virus
HLKVHLDVRGAKQLPHLKVLLDVRGAKQLPHLKVLLDVRGAK

SEQ ID NO: 1090 - protein, 48 aa, Shrimp White Spot Syndrome Virus
HLKVHLDVRGAKQLPHLKVLLDVRGAKQLPHLKVLLDVRGAKQNPWRK

SEQ ID NO: 1091 - protein, 10 aa, Shrimp White Spot Syndrome Virus
KVHLDVRGAK

SEQ ID NO: 1092 - protein, 14 aa, Shrimp White Spot Syndrome Virus
KVHLDVRGAKQLPH

SEQ ID NO: 1093 - protein, 29 aa, Shrimp White Spot Syndrome Virus
KVHLDVRGAKQLPHLKVLLDVRGAKQLPH

SEQ ID NO: 1094 - protein, 14 aa, Shrimp White Spot Syndrome Virus
HLDVRGAKQLPHLK

SEQ ID NO: 1095 - protein, 23 aa, Shrimp White Spot Syndrome Virus
HLDVRGAKQLPHLKVLLDVRGAK

SEQ ID NO: 1096 - protein, 29 aa, Shrimp White Spot Syndrome Virus
HLDVRGAKQLPHLKVLLDVRGAKQLPHLK

SEQ ID NO: 1097 - protein, 38 aa, Shrimp White Spot Syndrome Virus
HLDVRGAKQLPHLKVLLDVRGAKQLPHLKVLLDVRGAK

SEQ ID NO: 1098 - protein, 44 aa, Shrimp White Spot Syndrome Virus
HLDVRGAKQLPHLKVLLDVRGAKQLPHLKVLLDVRGAKQNPWRK

SEQ ID NO: 1099 - protein, 50 aa, Shrimp White Spot Syndrome Virus
HLDVRGAKQLPHLKVLLDVRGAKQLPHLKVLLDVRGAKQNPWRKNLCLLK

SEQ ID NO: 1100 - protein, 51 aa, Shrimp White Spot Syndrome Virus
HLDVRGAKQLPHLKVLLDVRGAKQLPHLKVLLDVRGAKQNPWRKNLCLLKK

SEQ ID NO: 1101 - protein, 7 aa, Shrimp White Spot Syndrome Virus
KQLPHLK

SEQ ID NO: 1102 - protein, 20 aa, Shrimp White Spot Syndrome Virus
KQLPHLKVLLDVRGAKQLPH

SEQ ID NO: 1103 - protein, 12 aa, Shrimp White Spot Syndrome Virus
HLKVLLDVRGAK

SEQ ID NO: 1104 - protein, 18 aa, Shrimp White Spot Syndrome Virus
HLKVLLDVRGAKQLPHLK

SEQ ID NO: 1105 - protein, 27 aa, Shrimp White Spot Syndrome Virus
HLKVLLDVRGAKQLPHLKVLLDVRGAK

SEQ ID NO: 1106 - protein, 43 aa, Shrimp White Spot Syndrome Virus
HLKVLLDVRGAKQLPHLKVLLDVRGAKQNPWRKNLCLLKKNVK

SEQ ID NO: 1107 - protein, 33 aa, Shrimp White Spot Syndrome Virus
HLKVLLDVRGAKQLPHLKVLLDVRGAKQNPWRK

SEQ ID NO: 1108 - protein, 46 aa, Shrimp White Spot Syndrome Virus
HLKVLLDVRGAKQLPHLKVLLDVRGAKQNPWRKNLCLLKKNVKSAK

SEQ ID NO: 1109 - protein, 39 aa, Shrimp White Spot Syndrome Virus
HLKVLLDVRGAKQLPHLKVLLDVRGAKQNPWRKNLCLLK

SEQ ID NO: 1110 - protein, 40 aa, Shrimp White Spot Syndrome Virus
HLKVLLDVRGAKQLPHLKVLLDVRGAKQNPWRKNLCLLKK

SEQ ID NO: 1111 - protein, 14 aa, Shrimp White Spot Syndrome Virus
KVLLDVRGAKQLPH

SEQ ID NO: 1112 - protein, 48 aa, Shrimp White Spot Syndrome Virus
KVLLDVRGAKQLPHLKVLLDVRGAKQNPWRKNLCLLKKNVKSAKQLPH

SEQ ID NO: 1113 - protein, 7 aa, Shrimp White Spot Syndrome Virus
KQLPHLK

SEQ ID NO: 1114 - protein, 39 aa, Shrimp White Spot Syndrome Virus
KQLPHLKVLLDVRGAKQNPWRKNLCLLKKNVKSAKQLPH

SEQ ID NO: 1115 - protein, 12 aa, Shrimp White Spot Syndrome Virus
HLKVLLDVRGAK

SEQ ID NO: 1116 - protein, 28 aa, Shrimp White Spot Syndrome Virus
HLKVLLDVRGAKQNPWRKNLCLLKKNVK

SEQ ID NO: 1117 - protein, 18 aa, Shrimp White Spot Syndrome Virus
HLKVLLDVRGAKQNPWRK

SEQ ID NO: 1118 - protein, 31 aa, Shrimp White Spot Syndrome Virus
HLKVLLDVRGAKQNPWRKNLCLLKKNVKSAK

SEQ ID NO: 1119 - protein, 24 aa, Shrimp White Spot Syndrome Virus
HLKVLLDVRGAKQNPWRKNLCLLK

SEQ ID NO: 1120 - protein, 25 aa, Shrimp White Spot Syndrome Virus
HLKVLLDVRGAKQNPWRKNLCLLKK

SEQ ID NO: 1121 - protein, 37 aa, Shrimp White Spot Syndrome Virus
HLKVLLDVRGAKQNPWRKNLCLLKKNVKSAKQLPHLK

SEQ ID NO: 1122 - protein, 46 aa, Shrimp White Spot Syndrome Virus
HLKVLLDVRGAKQNPWRKNLCLLKKNVKSAKQLPHLKVLLDVRGAK

SEQ ID NO: 1123 - protein, 33 aa, Shrimp White Spot Syndrome Virus
KVLLDVRGAKQNPWRKNLCLLKKNVKSAKQLPH

SEQ ID NO: 1124 - protein, 48 aa, Shrimp White Spot Syndrome Virus
KVLLDVRGAKQNPWRKNLCLLKKNVKSAKQLPHLKVLLDVRGAKQLPH

SEQ ID NO: 1125 - protein, 24 aa, Shrimp White Spot Syndrome Virus
KQNPWRKNLCLLKKNVKSAKQLPH

SEQ ID NO: 1126 - protein, 39 aa, Shrimp White Spot Syndrome Virus; identical to SEQ ID NO: 969

SEQ ID NO: 1127 - protein, 43 aa, Shrimp White Spot Syndrome Virus
KQNPWRKNLCLLKKNVKSAKQLPHLKVLLDVRGAKQLPHLKVH

SEQ ID NO: 1128 - protein, 18 aa, Shrimp White Spot Syndrome Virus
KNLCLLKKNVKSAKQLPH

SEQ ID NO: 1129 - protein, 33 aa, Shrimp White Spot Syndrome Virus; identical to SEQ ID NO: 971

SEQ ID NO: 1130 - protein, 37 aa, Shrimp White Spot Syndrome Virus
KNLCLLKKNVKSAKQLPHLKVLLDVRGAKQLPHLKVH

SEQ ID NO: 1131 - protein, 12 aa, Shrimp White Spot Syndrome Virus
KKNVKSAKQLPH

SEQ ID NO: 1132 - protein, 27 aa, Shrimp White Spot Syndrome Virus
KKNVKSAKQLPHLKVLLDVRGAKQLPH

SEQ ID NO: 1133 - protein, 31 aa, Shrimp White Spot Syndrome Virus; identical to SEQ ID NO: 667

SEQ ID NO: 1134 - protein, 11 aa, Shrimp White Spot Syndrome Virus
KNVKSAKQLPH

SEQ ID NO: 1135 - protein, 26 aa, Shrimp White Spot Syndrome Virus
KNVKSAKQLPHLKVLLDVRGAKQLPH

SEQ ID NO: 1136 - protein, 30 aa, Shrimp White Spot Syndrome Virus
KNVKSAKQLPHLKVLLDVRGAKQLPHLKVH

SEQ ID NO: 1137 - protein, 10 aa, Shrimp White Spot Syndrome Virus
KSAKQLPHLK

SEQ ID NO: 1138 - protein, 23 aa, Shrimp White Spot Syndrome Virus
KSAKQLPHLKVLLDVRGAKQLPH

SEQ ID NO: 1139 - protein, 27 aa, Shrimp White Spot Syndrome Virus
KSAKQLPHLKVLLDVRGAKQLPHLKVH

SEQ ID NO: 1140 - protein, 7 aa, Shrimp White Spot Syndrome Virus
KQLPHLK

SEQ ID NO: 1141 - protein, 20 aa, Shrimp White Spot Syndrome Virus
KQLPHLKVLLDVRGAKQLPH

SEQ ID NO: 1142 - protein, 24 aa, Shrimp White Spot Syndrome Virus
KQLPHLKVLLDVRGAKQLPHLKVH

SEQ ID NO: 1143 - protein, 49 aa, Shrimp White Spot Syndrome Virus
KQLPHLKVLLDVRGAKQLPHLKVHLDVRGAKQQQQLCLPLKTISTSFTH

SEQ ID NO: 1144 - protein, 12 aa, Shrimp White Spot Syndrome Virus
HLKVLLDVRGAK

SEQ ID NO: 1145 - protein, 18 aa, Shrimp White Spot Syndrome Virus
HLKVLLDVRGAKQLPHLK

SEQ ID NO: 1146 - protein, 27 aa, Shrimp White Spot Syndrome Virus
HLKVLLDVRGAKQLPHLKVHLDVRGAK

SEQ ID NO: 1147 - protein, 37 aa, Shrimp White Spot Syndrome Virus
HLKVLLDVRGAKQLPHLKVHLDVRGAKQQQQLCLPLK

SEQ ID NO: 1148 - protein, 14 aa, Shrimp White Spot Syndrome Virus
KVLLDVRGAKQLPH

SEQ ID NO: 1149 - protein, 18 aa, Shrimp White Spot Syndrome Virus
KVLLDVRGAKQLPHLKVH

SEQ ID NO: 1150 - protein, 43 aa, Shrimp White Spot Syndrome Virus
KVLLDVRGAKQLPHLKVHLDVRGAKQQQQLCLPLKTISTSFTH

SEQ ID NO: 1151 - protein, 7 aa, Shrimp White Spot Syndrome Virus
KQLPHLK

SEQ ID NO: 1152 - protein, 9 aa, Shrimp White Spot Syndrome Virus
KQLPHLKVH

SEQ ID NO: 1153 - protein, 34 aa, Shrimp White Spot Syndrome Virus
KQLPHLKVHLDVRGAKQQQQLCLPLKTISTSFTH

SEQ ID NO: 1154 - protein, 46 aa, Shrimp White Spot Syndrome Virus
KQLPHLKVHLDVRGAKQQQQLCLPLKTISTSFTHLLLCLYMEYGKH

SEQ ID NO: 1155 - protein, 22 aa, Shrimp White Spot Syndrome Virus
HLKVHLDVRGAKQQQQLCLPLK

SEQ ID NO: 1156 - protein, 48 aa, Shrimp White Spot Syndrome Virus
HLKVHLDVRGAKQQQQLCLPLKTISTSFTHLLLCLYMEYGKHQNLQVK

SEQ ID NO: 1157 - protein, 12 aa, Shrimp White Spot Syndrome Virus
HLKVHLDVRGAK

SEQ ID NO: 1158 - protein, 10 aa, Shrimp White Spot Syndrome Virus
KVHLDVRGAK

SEQ ID NO: 1159 - protein, 28 aa, Shrimp White Spot Syndrome Virus
KVHLDVRGAKQQQQLCLPLKTISTSFTH

SEQ ID NO: 1160 - protein, 40 aa, Shrimp White Spot Syndrome Virus
KVHLDVRGAKQQQQLCLPLKTISTSFTHLLLCLYMEYGKH

SEQ ID NO: 1161 - protein, 18 aa, Shrimp White Spot Syndrome Virus
HLDVRGAKQQQQLCLPLK

SEQ ID NO: 1162 - protein, 44 aa, Shrimp White Spot Syndrome Virus
HLDVRGAKQQQQLCLPLKTISTSFTHLLLCLYMEYGKHQNLQVK

SEQ ID NO: 1163 - protein, 19 aa, Shrimp White Spot Syndrome Virus
KQQQQLCLPLKTISTSFTH

SEQ ID NO: 1164 - protein, 31 aa, Shrimp White Spot Syndrome Virus
KQQQQLCLPLKTISTSFTHLLLCLYMEYGKH

SEQ ID NO: 1165 - protein, 19 aa, Shrimp White Spot Syndrome Virus
HLLLCLYMEYGKHQNLQVK

SEQ ID NO: 1166 - protein, 8 aa, Shrimp White Spot Syndrome Virus
KHQNLQVK

SEQ ID NO: 1167 - protein, 370 aa, Shrimp white spot bacilliform virus
MKICQISSPTLTLSIPLEGVYHVKQLLHLKVHLDVKGVKQLLHLKVRLDVRGAKQNPWRKNLCLLKKNVKSAKQLPHLKVHLDVKSAKQLPHLKVHLDVRGAKQLPHLKVRLDVKSAKQLPHLKVHLDVRGAKQLPHLKVRLDVRGAKQNPWRKNLCLLKKNVKSAKQLPHLKVHLDVKGVKQLLHLKVRLDVRGAKQLPHLKVHLDVRGAKQNPWRKNLCLLKKNVKSAKQLPHLKVLLDVRGAKQLPHLKVLLDVRGAKQLPHLKVLLDVRGAKQNPWRKNLCLLKKNVKSAKQLPHLKVLLDVRGAKQLPHLKVHLDVRGAKQQQQLCLPLKTISTSFTHLLLCLYMEYGKHQNLQVKMWLNITYTS

SEQ ID NO: 1168 - protein, 340 aa, Shrimp white spot bacilliform virus
HVKQLLHLKVHLDVKGVKQLLHLKVRLDVRGAKQNPWRKNLCLLKKNVKSAKQLPHLKVHLDVKSAKQLPHLKVHLDVRGAKQLPHLKVRLDVKSAKQLPHLKVHLDVRGAKQLPHLKVRLDVRGAKQNPWRKNLCLLKKNVKSAKQLPHLKVHLDVKGVKQLLHLKVRLDVRGAKQLPHLKVHLDVRGAKQNPWRKNLCLLKKNVKSAKQLPHLKVLLDVRGAKQLPHLKVLLDVRGAKQLPHLKVLLDVRGAKQNPWRKNLCLLKKNVKSAKQLPHLKVLLDVRGAKQLPHLKVHLDVRGAKQQQQLCLPLKTISTSFTHLLLCLYMEYGKHQNLQVK

SEQ ID NO: 1169 - protein, 9 aa, Shrimp white spot syndrome virus
HVKQLLHLK

SEQ ID NO: 1170 - protein, 15 aa, Shrimp white spot syndrome virus
HVKQLLHLKVHLDVK

SEQ ID NO: 1171 - protein, 18 aa, Shrimp white spot syndrome virus
HVKQLLHLKVHLDVKGVK

SEQ ID NO: 1172 - protein, 24 aa, Shrimp white spot syndrome virus
HVKQLLHLKVHLDVKGVKQLLHLK

SEQ ID NO: 1173 - protein, 33 aa, Shrimp white spot syndrome virus; identical to SEQ ID NO: 674

SEQ ID NO: 1174 - protein, 39 aa, Shrimp white spot syndrome virus; identical to SEQ ID NO: 675

SEQ ID NO: 1175 - protein, 45 aa, Shrimp white spot syndrome virus; identical to SEQ ID NO: 676

SEQ ID NO: 1176 - protein, 46 aa, Shrimp white spot syndrome virus; identical to SEQ ID NO: 677

SEQ ID NO: 1177 - protein, 49 aa, Shrimp white spot syndrome virus; identical to SEQ ID NO: 678

SEQ ID NO: 1178 - protein, 7 aa, Shrimp white spot syndrome virus
KQLLHLK

SEQ ID NO: 1179 - protein, 9 aa, Shrimp white spot syndrome virus
KQLLHLKVH

SEQ ID NO: 1180 - protein, 20 aa, Shrimp white spot syndrome virus
KQLLHLKVHLDVKGVKQLLH

SEQ ID NO: 1181 - protein, 9 aa, Shrimp white spot syndrome virus
HLKVHLDVK

SEQ ID NO: 1182 - protein, 12 aa, Shrimp white spot syndrome virus
HLKVHLDVKGVK

SEQ ID NO: 1183 - protein, 18 aa, Shrimp white spot syndrome virus
HLKVHLDVKGVKQLLHLK

SEQ ID NO: 1184 - protein, 27 aa, Shrimp white spot syndrome virus
HLKVHLDVKGVKQLLHLKVRLDVRGAK

SEQ ID NO: 1185 - protein, 33 aa, Shrimp white spot syndrome virus; identical to SEQ ID NO: 686

SEQ ID NO: 1186 - protein, 39 aa, Shrimp white spot syndrome virus; identical to SEQ ID NO: 687

SEQ ID NO: 1187 - protein, 40 aa, Shrimp white spot syndrome virus; identical to SEQ ID NO: 688

SEQ ID NO: 1188 - protein, 43 aa, Shrimp white spot syndrome virus; identical to SEQ ID NO: 689

SEQ ID NO: 1189 - protein, 46 aa, Shrimp white spot syndrome virus; identical to SEQ ID NO: 690

SEQ ID NO: 1190 - protein, 48 aa, Shrimp white spot syndrome virus; identical to SEQ ID NO: 691

SEQ ID NO: 1191 - protein, 7 aa, Shrimp white spot syndrome virus
KVHLDVK

SEQ ID NO: 1192 - protein, 10 aa, Shrimp white spot syndrome virus
KVHLDVKGVK

SEQ ID NO: 1193 - protein, 14 aa, Shrimp white spot syndrome virus
KVHLDVKGVKQLLH

SEQ ID NO: 1194 - protein, 14 aa, Shrimp white spot syndrome virus
HLDVKGVKQLLHLK

SEQ ID NO: 1195 - protein, 23 aa, Shrimp white spot syndrome virus
HLDVKGVKQLLHLKVRLDVRGAK

SEQ ID NO: 1196 - protein, 29 aa, Shrimp white spot syndrome virus
HLDVKGVKQLLHLKVRLDVRGAKQNPWRK

SEQ ID NO: 1197 - protein, 35 aa, Shrimp white spot syndrome virus; identical to SEQ ID NO: 698

SEQ ID NO: 1198 - protein, 36 aa, Shrimp white spot syndrome virus; identical to SEQ ID NO: 699

SEQ ID NO: 1199 - protein, 39 aa, Shrimp white spot syndrome virus; identical to SEQ ID NO: 700

SEQ ID NO: 1200 - protein, 42 aa, Shrimp white spot syndrome virus; identical to SEQ ID NO: 701

SEQ ID NO: 1201 - protein, 48 aa, Shrimp white spot syndrome virus; identical to SEQ ID NO: 702

SEQ ID NO: 1202 - protein, 10 aa, Shrimp white spot syndrome virus
KGVKQLLHLK

SEQ ID NO: 1203 - protein, 42 aa, Shrimp white spot syndrome virus; identical to SEQ ID NO: 704

SEQ ID NO: 1204 - protein, 46 aa, Shrimp white spot syndrome virus; identical to SEQ ID NO: 705

SEQ ID NO: 1205 - protein, 7 aa, Shrimp white spot syndrome virus
KQLLHLK

SEQ ID NO: 1206 - protein, 39 aa, Shrimp white spot syndrome virus; identical to SEQ ID NO: 707

SEQ ID NO: 1207 - protein, 43 aa, Shrimp white spot syndrome virus; identical to SEQ ID NO: 708

SEQ ID NO: 1208 - protein, 12 aa, Shrimp white spot syndrome virus
HLKVRLDVRGAK

SEQ ID NO: 1209 - protein, 18 aa, Shrimp white spot syndrome virus
HLKVRLDVRGAKQNPWRK

SEQ ID NO: 1210 - protein, 24 aa, Shrimp white spot syndrome virus
HLKVRLDVRGAKQNPWRKNLCLLK

SEQ ID NO: 1211 - protein, 25 aa, Shrimp white spot syndrome virus
HLKVRLDVRGAKQNPWRKNLCLLKK

SEQ ID NO: 1212 - protein, 28 aa, Shrimp white spot syndrome virus
HLKVRLDVRGAKQNPWRKNLCLLKKNVK

SEQ ID NO: 1213 - protein, 31 aa, Shrimp white spot syndrome virus; identical to SEQ ID NO: 714

SEQ ID NO: 1214 - protein, 37 aa, Shrimp white spot syndrome virus; identical to SEQ ID NO: 715

SEQ ID NO: 1215 - protein, 43 aa, Shrimp white spot syndrome virus; identical to SEQ ID NO: 716

SEQ ID NO: 1216 - protein, 46 aa, Shrimp white spot syndrome virus; identical to SEQ ID NO: 717

SEQ ID NO: 1217 - protein, 33 aa, Shrimp white spot syndrome virus; identical to SEQ ID NO: 718

SEQ ID NO: 1218 - protein, 37 aa, Shrimp white spot syndrome virus; identical to SEQ ID NO: 719

SEQ ID NO: 1219 - protein, 48 aa, Shrimp white spot syndrome virus; identical to SEQ ID NO: 720

SEQ ID NO: 1220 - protein, 24 aa, Shrimp white spot syndrome virus
KQNPWRKNLCLLKKNVKSAKQLPH

SEQ ID NO: 1221 - protein, 28 aa, Shrimp white spot syndrome virus
KQNPWRKNLCLLKKNVKSAKQLPHLKVH

SEQ ID NO: 1222 - protein, 39 aa, Shrimp white spot syndrome virus; identical to SEQ ID NO: 723

SEQ ID NO: 1223 - protein, 43 aa, Shrimp white spot syndrome virus; identical to SEQ ID NO: 724

SEQ ID NO: 1224 - protein, 48 aa, Shrimp white spot syndrome virus; identical to SEQ ID NO: 725

SEQ ID NO: 1225 - protein, 18 aa, Shrimp white spot syndrome virus
KNLCLLKKNVKSAKQLPH

SEQ ID NO: 1226 - protein, 22 aa, Shrimp white spot syndrome virus
KNLCLLKKNVKSAKQLPHLKVH

SEQ ID NO: 1227 - protein, 33 aa, Shrimp white spot syndrome virus; identical to SEQ ID NO: 728

SEQ ID NO: 1228 - protein, 37 aa, Shrimp white spot syndrome virus; identical to SEQ ID NO: 729

SEQ ID NO: 1229 - protein, 12 aa, Shrimp white spot syndrome virus
KKNVKSAKQLPH

SEQ ID NO: 1230 - protein, 16 aa, Shrimp white spot syndrome virus
KKNVKSAKQLPHLKVH

SEQ ID NO: 1231 - protein, 27 aa, Shrimp white spot syndrome virus
KKNVKSAKQLPHLKVHLDVKSAKQLPH

SEQ ID NO: 1232 - protein, 31 aa, Shrimp white spot syndrome virus; identical to SEQ ID NO: 663

SEQ ID NO: 1233 - protein, 42 aa, Shrimp white spot syndrome virus; identical to SEQ ID NO: 734

SEQ ID NO: 1234 - protein, 11 aa, Shrimp white spot syndrome virus
KNVKSAKQLPH

SEQ ID NO: 1235 - protein, 15 aa, Shrimp white spot syndrome virus
KNVKSAKQLPHLKVH

SEQ ID NO: 1236 - protein, 26 aa, Shrimp white spot syndrome virus
KNVKSAKQLPHLKVHLDVKSAKQLPH

SEQ ID NO: 1237 - protein, 30 aa, Shrimp white spot syndrome virus; identical to SEQ ID NO: 738

SEQ ID NO: 1238 - protein, 41 aa, Shrimp white spot syndrome virus; identical to SEQ ID NO: 739

SEQ ID NO: 1239 - protein, 38 aa, Shrimp white spot syndrome virus; identical to SEQ ID NO: 740

SEQ ID NO: 1240 - protein, 10 aa, Shrimp white spot syndrome virus
KSAKQLPHLK

SEQ ID NO: 1241 - protein, 12 aa, Shrimp white spot syndrome virus
KSAKQLPHLKVH

SEQ ID NO: 1242 - protein, 23 aa, Shrimp white spot syndrome virus
KSAKQLPHLKVHLDVKSAKQLPH

SEQ ID NO: 1243 - protein, 27 aa, Shrimp white spot syndrome virus
KSAKQLPHLKVHLDVKSAKQLPHLKVH

SEQ ID NO: 1244 - protein, 7 aa, Shrimp white spot syndrome virus
KQLPHLK

SEQ ID NO: 1245 - protein, 9 aa, Shrimp white spot syndrome virus
KQLPHLKVH

SEQ ID NO: 1246 - protein, 35 aa, Shrimp white spot syndrome virus; identical to SEQ ID NO: 747

SEQ ID NO: 1247 - protein, 20 aa, Shrimp white spot syndrome virus
KQLPHLKVHLDVKSAKQLPH

SEQ ID NO: 1248 - protein, 24 aa, Shrimp white spot syndrome virus
KQLPHLKVHLDVKSAKQLPHLKVH

SEQ ID NO: 1249 - protein, 50 aa, Shrimp white spot syndrome virus; identical to SEQ ID NO: 750

SEQ ID NO: 1250 - protein, 9 aa, Shrimp white spot syndrome virus
HLKVHLDVK

SEQ ID NO: 1251 - protein, 12 aa, Shrimp white spot syndrome virus
HLKVHLDVKSAK

SEQ ID NO: 1252 - protein, 18 aa, Shrimp white spot syndrome virus
HLKVHLDVKSAKQLPHLK

SEQ ID NO: 1253 - protein, 27 aa, Shrimp white spot syndrome virus
HLKVHLDVKSAKQLPHLKVHLDVRGAK

SEQ ID NO: 1254 - protein, 33 aa, Shrimp white spot syndrome virus; identical to SEQ ID NO: 755

SEQ ID NO: 1255 - protein, 39 aa, Shrimp white spot syndrome virus; identical to SEQ ID NO: 756

SEQ ID NO: 1256 - protein, 42 aa, Shrimp white spot syndrome virus; identical to SEQ ID NO: 757

SEQ ID NO: 1257 - protein, 48 aa, Shrimp white spot syndrome virus; identical to SEQ ID NO: 758

SEQ ID NO: 1258 - protein, 29 aa, Shrimp white spot syndrome virus
KVHLDVKSAKQLPHLKVHLDVRGAKQLPH

SEQ ID NO: 1259 - protein, 44 aa, Shrimp white spot syndrome virus; identical to SEQ ID NO: 760

SEQ ID NO: 1260 - protein, 48 aa, Shrimp white spot syndrome virus; identical to SEQ ID NO: 761

SEQ ID NO: 1261 - protein, 7 aa, Shrimp white spot syndrome virus
KVHLDVK

SEQ ID NO: 1262 - protein, 10 aa, Shrimp white spot syndrome virus
KVHLDVKSAK

SEQ ID NO: 1263 - protein, 14 aa, Shrimp white spot syndrome virus
KVHLDVKSAKQLPH

SEQ ID NO: 1264 - protein, 18 aa, Shrimp white spot syndrome virus
KVHLDVKSAKQLPHLKVH

SEQ ID NO: 1265 - protein, 14 aa, Shrimp white spot syndrome virus
HLDVKSAKQLPHLK

SEQ ID NO: 1266 - protein, 23 aa, Shrimp white spot syndrome virus
HLDVKSAKQLPHLKVHLDVRGAK

SEQ ID NO: 1267 - protein, 29 aa, Shrimp white spot syndrome virus
HLDVKSAKQLPHLKVHLDVRGAKQLPHLK

SEQ ID NO: 1268 - protein, 35 aa, Shrimp white spot syndrome virus; identical to SEQ ID NO: 769

SEQ ID NO: 1269 - protein, 38 aa, Shrimp white spot syndrome virus; identical to SEQ ID NO: 770

SEQ ID NO: 1270 - protein, 44 aa, Shrimp white spot syndrome virus; identical to SEQ ID NO: 771

SEQ ID NO: 1271 - protein, 23 aa, Shrimp white spot syndrome virus
KSAKQLPHLKVHLDVRGAKQLPH

SEQ ID NO: 1272 - protein, 38 aa, Shrimp white spot syndrome virus; identical to SEQ ID NO: 773

SEQ ID NO: 1273 - protein, 42 aa, Shrimp white spot syndrome virus; identical to SEQ ID NO: 774

SEQ ID NO: 1274 - protein, 10 aa, Shrimp white spot syndrome virus
KSAKQLPHLK

SEQ ID NO: 1275 - protein, 12 aa, Shrimp white spot syndrome virus
KSAKQLPHLKVH

SEQ ID NO: 1276 - protein, 20 aa, Shrimp white spot syndrome virus
KQLPHLKVHLDVRGAKQLPH

SEQ ID NO: 1277 - protein, 35 aa, Shrimp white spot syndrome virus; identical to SEQ ID NO: 778

SEQ ID NO: 1278 - protein, 39 aa, Shrimp white spot syndrome virus; identical to SEQ ID NO: 779

SEQ ID NO: 1279 - protein, 7 aa, Shrimp white spot syndrome virus
KQLPHLK

SEQ ID NO: 1280 - protein, 9 aa, Shrimp white spot syndrome virus
KQLPHLKVH

SEQ ID NO: 1281 - protein, 50 aa, Shrimp white spot syndrome virus; identical to SEQ ID NO: 782

SEQ ID NO: 1282 - protein, 24 aa, Shrimp white spot syndrome virus
HLKVHLDVRGAKQLPHLKVRLDVK

SEQ ID NO: 1283 - protein, 27 aa, Shrimp white spot syndrome virus
HLKVHLDVRGAKQLPHLKVRLDVKSAK

SEQ ID NO: 1284 - protein, 33 aa, Shrimp white spot syndrome virus; identical to SEQ ID NO: 785

SEQ ID NO: 1285 - protein, 42 aa, Shrimp white spot syndrome virus; identical to SEQ ID NO: 786

SEQ ID NO: 1286 - protein, 48 aa, Shrimp white spot syndrome virus; identical to SEQ ID NO: 787

SEQ ID NO: 1287 - protein, 12 aa, Shrimp white spot syndrome virus
HLKVHLDVRGAK

SEQ ID NO: 1288 - protein, 18 aa, Shrimp white spot syndrome virus
HLKVHLDVRGAKQLPHLK

SEQ ID NO: 1289 - protein, 10 aa, Shrimp white spot syndrome virus
KVHLDVRGAK

SEQ ID NO: 1290 - protein, 14 aa, Shrimp white spot syndrome virus
KVHLDVRGAKQLPH

SEQ ID NO: 1291 - protein, 29 aa, Shrimp white spot syndrome virus
KVHLDVRGAKQLPHLKVRLDVKSAKQLPH

SEQ ID NO: 1292 - protein, 33 aa, Shrimp white spot syndrome virus; identical to SEQ ID NO: 793

SEQ ID NO: 1293 - protein, 44 aa, Shrimp white spot syndrome virus; identical to SEQ ID NO: 794

SEQ ID NO: 1294 - protein, 14 aa, Shrimp white spot syndrome virus
HLDVRGAKQLPHLK

SEQ ID NO: 1295 - protein, 20 aa, Shrimp white spot syndrome virus
HLDVRGAKQLPHLKVRLDVK

SEQ ID NO: 1296 - protein, 23 aa, Shrimp white spot syndrome virus
HLDVRGAKQLPHLKVRLDVKSAK

SEQ ID NO: 1297 - protein, 29 aa, Shrimp white spot syndrome virus
HLDVRGAKQLPHLKVRLDVKSAKQLPHLK

SEQ ID NO: 1298 - protein, 38 aa, Shrimp white spot syndrome virus; identical to SEQ ID NO: 799

SEQ ID NO: 1299 - protein, 44 aa, Shrimp white spot syndrome virus; identical to SEQ ID NO: 800

SEQ ID NO: 1300 - protein, 7 aa, Shrimp white spot syndrome virus
KQLPHLK

SEQ ID NO: 1301 - protein, 20 aa, Shrimp white spot syndrome virus
KQLPHLKVRLDVKSAKQLPH

SEQ ID NO: 1302 - protein, 24 aa, Shrimp white spot syndrome virus
KQLPHLKVRLDVKSAKQLPHLKVH

SEQ ID NO: 1303 - protein, 35 aa, Shrimp white spot syndrome virus; identical to SEQ ID NO: 804

SEQ ID NO: 1304 - protein, 9 aa, Shrimp white spot syndrome virus
HLKVRLDVK

SEQ ID NO: 1305 - protein, 12 aa, Shrimp white spot syndrome virus
HLKVRLDVKSAK

SEQ ID NO: 1306 - protein, 18 aa, Shrimp white spot syndrome virus
HLKVRLDVKSAKQLPHLK

SEQ ID NO: 1307 - protein, 27 aa, Shrimp white spot syndrome virus
HLKVRLDVKSAKQLPHLKVHLDVRGAK

SEQ ID NO: 1308 - protein, 33 aa, Shrimp white spot syndrome virus; identical to SEQ ID NO: 809

SEQ ID NO: 1309 - protein, 42 aa, Shrimp white spot syndrome virus; identical to SEQ ID NO: 810

SEQ ID NO: 1310 - protein, 48 aa, Shrimp white spot syndrome virus; identical to SEQ ID NO: 811

SEQ ID NO: 1311 - protein, 14 aa, Shrimp white spot syndrome virus
KVRLDVKSAKQLPH

SEQ ID NO: 1312 - protein, 18 aa, Shrimp white spot syndrome virus
KVRLDVKSAKQLPHLKVH

SEQ ID NO: 1313 - protein, 29 aa, Shrimp white spot syndrome virus
KVRLDVKSAKQLPHLKVHLDVRGAKQLPH

SEQ ID NO: 1314 - protein, 10 aa, Shrimp white spot syndrome virus
KSAKQLPHLK

SEQ ID NO: 1315 - protein, 12 aa, Shrimp white spot syndrome virus
KSAKQLPHLKVH

SEQ ID NO: 1316 - protein, 23 aa, Shrimp white spot syndrome virus
KSAKQLPHLKVHLDVRGAKQLPH

SEQ ID NO: 1317 - protein, 7 aa, Shrimp white spot syndrome virus
KQLPHLK

SEQ ID NO: 1318 - protein, 9 aa, Shrimp white spot syndrome virus
KQLPHLKVH

SEQ ID NO: 1319 - protein, 20 aa, Shrimp white spot syndrome virus
KQLPHLKVHLDVRGAKQLPH

SEQ ID NO: 1320 - protein, 12 aa, Shrimp white spot syndrome virus
HLKVHLDVRGAK

SEQ ID NO: 1321 - protein, 18 aa, Shrimp white spot syndrome virus
HLKVHLDVRGAKQLPHLK

SEQ ID NO: 1322 - protein, 27 aa, Shrimp white spot syndrome virus
HLKVHLDVRGAKQLPHLKVRLDVRGAK

SEQ ID NO: 1323 - protein, 33 aa, Shrimp white spot syndrome virus; identical to SEQ ID NO: 824

SEQ ID NO: 1324 - protein, 39 aa, Shrimp white spot syndrome virus; identical to SEQ ID NO: 825

SEQ ID NO: 1325 - protein, 40 aa, Shrimp white spot syndrome virus; identical to SEQ ID NO: 826

SEQ ID NO: 1326 - protein, 43 aa, Shrimp white spot syndrome virus; identical to SEQ ID NO: 827

SEQ ID NO: 1327 - protein, 46 aa, Shrimp white spot syndrome virus; identical to SEQ ID NO: 828

SEQ ID NO: 1328 - protein, 10 aa, Shrimp white spot syndrome virus
KVHLDVRGAK

SEQ ID NO: 1329 - protein, 14 aa, Shrimp white spot syndrome virus
KVHLDVRGAKQLPH

SEQ ID NO: 1330 - protein, 48 aa, Shrimp white spot syndrome virus; identical to SEQ ID NO: 831

SEQ ID NO: 1331 - protein, 14 aa, Shrimp white spot syndrome virus
HLDVRGAKQLPHLK

SEQ ID NO: 1332 - protein, 23 aa, Shrimp white spot syndrome virus
HLDVRGAKQLPHLKVRLDVRGAK

SEQ ID NO: 1333 - protein, 29 aa, Shrimp white spot syndrome virus
HLDVRGAKQLPHLKVRLDVRGAKQNPWRK

SEQ ID NO: 1334 - protein, 35 aa, Shrimp white spot syndrome virus; identical to SEQ ID NO: 835

SEQ ID NO: 1335 - protein, 36 aa, Shrimp white spot syndrome virus; identical to SEQ ID NO: 836

SEQ ID NO: 1336 - protein, 39 aa, Shrimp white spot syndrome virus; identical to SEQ ID NO: 837

SEQ ID NO: 1337 - protein, 42 aa, Shrimp white spot syndrome virus; identical to SEQ ID NO: 838

SEQ ID NO: 1338 - protein, 48 aa, Shrimp white spot syndrome virus; identical to SEQ ID NO: 839

SEQ ID NO: 1339 - protein, 43 aa, Shrimp white spot syndrome virus; identical to SEQ ID NO: 840

SEQ ID NO: 1340 - protein, 7 aa, Shrimp white spot syndrome virus
KQLPHLK

SEQ ID NO: 1341 - protein, 39 aa, Shrimp white spot syndrome virus; identical to SEQ ID NO: 842

SEQ ID NO: 1342 - protein, 12 aa, Shrimp white spot syndrome virus
HLKVRLDVRGAK

SEQ ID NO: 1343 - protein, 18 aa, Shrimp white spot syndrome virus
HLKVRLDVRGAKQNPWRK

SEQ ID NO: 1344 - protein, 24 aa, Shrimp white spot syndrome virus
HLKVRLDVRGAKQNPWRKNLCLLK

SEQ ID NO: 1345 - protein, 25 aa, Shrimp white spot syndrome virus
HLKVRLDVRGAKQNPWRKNLCLLKK

SEQ ID NO: 1346 - protein, 28 aa, Shrimp white spot syndrome virus
HLKVRLDVRGAKQNPWRKNLCLLKKNVK

SEQ ID NO: 1347 - protein, 31 aa, Shrimp white spot syndrome virus; identical to SEQ ID NO: 714

SEQ ID NO: 1348 - protein, 37 aa, Shrimp white spot syndrome virus; identical to SEQ ID NO: 715

SEQ ID NO: 1349 - protein, 43 aa, Shrimp white spot syndrome virus; identical to SEQ ID NO: 716

SEQ ID NO: 1350 - protein, 46 aa, Shrimp white spot syndrome virus; identical to SEQ ID NO: 851

SEQ ID NO: 1351 - protein, 33 aa, Shrimp white spot syndrome virus; identical to SEQ ID NO: 718

SEQ ID NO: 1352 - protein, 37 aa, Shrimp white spot syndrome virus; identical to SEQ ID NO: 719

SEQ ID NO: 1353 - protein, 48 aa, Shrimp white spot syndrome virus; identical to SEQ ID NO: 854

SEQ ID NO: 1354 - protein, 24 aa, Shrimp white spot syndrome virus
KQNPWRKNLCLLKKNVKSAKQLPH

SEQ ID NO: 1355 - protein, 28 aa, Shrimp white spot syndrome virus
KQNPWRKNLCLLKKNVKSAKQLPHLKVH

SEQ ID NO: 1356 - protein, 39 aa, Shrimp white spot syndrome virus; identical to SEQ ID NO: 857

SEQ ID NO: 1357 - protein, 48 aa, Shrimp white spot syndrome virus
KNLCLLKKNVKSAKQLPHLKVHLDVKGVKQLLHLKVRLDVRGAKQLPH

SEQ ID NO: 1358 - protein, 18 aa, Shrimp white spot syndrome virus
KNLCLLKKNVKSAKQLPH

SEQ ID NO: 1359 - protein, 22 aa, Shrimp white spot syndrome virus
KNLCLLKKNVKSAKQLPHLKVH

SEQ ID NO: 1360 - protein, 33 aa, Shrimp white spot syndrome virus; identical to SEQ ID NO: 861

SEQ ID NO: 1361 - protein, 12 aa, Shrimp white spot syndrome virus
KKNVKSAKQLPH

SEQ ID NO: 1362 - protein, 16 aa, Shrimp white spot syndrome virus
KKNVKSAKQLPHLKVH

SEQ ID NO: 1363 - protein, 27 aa, Shrimp white spot syndrome virus
KKNVKSAKQLPHLKVHLDVKGVKQLLH

SEQ ID NO: 1364 - protein, 42 aa, Shrimp white spot syndrome virus
KKNVKSAKQLPHLKVHLDVKGVKQLLHLKVRLDVRGAKQLPH

SEQ ID NO: 1365 - protein, 46 aa, Shrimp white spot syndrome virus
KKNVKSAKQLPHLKVHLDVKGVKQLLHLKVRLDVRGAKQLPHLKVH

SEQ ID NO: 1366 - protein, 11 aa, Shrimp white spot syndrome virus
KNVKSAKQLPH

SEQ ID NO: 1367 - protein, 15 aa, Shrimp white spot syndrome virus
KNVKSAKQLPHLKVH

SEQ ID NO: 1368 - protein, 26 aa, Shrimp white spot syndrome virus
KNVKSAKQLPHLKVHLDVKGVKQLLH

SEQ ID NO: 1369 - protein, 41 aa, Shrimp white spot syndrome virus
KNVKSAKQLPHLKVHLDVKGVKQLLHLKVRLDVRGAKQLPH

SEQ ID NO: 1370 - protein, 45 aa, Shrimp white spot syndrome virus
KNVKSAKQLPHLKVHLDVKGVKQLLHLKVRLDVRGAKQLPHLKVH

SEQ ID NO: 1371 - protein, 10 aa, Shrimp white spot syndrome virus
KSAKQLPHLK

SEQ ID NO: 1372 - protein, 12 aa, Shrimp white spot syndrome virus
KSAKQLPHLKVH

SEQ ID NO: 1373 - protein, 23 aa, Shrimp white spot syndrome virus
KSAKQLPHLKVHLDVKGVKQLLH

SEQ ID NO: 1374 - protein, 38 aa, Shrimp white spot syndrome virus
KSAKQLPHLKVHLDVKGVKQLLHLKVRLDVRGAKQLPH

SEQ ID NO: 1375 - protein, 42 aa, Shrimp white spot syndrome virus
KSAKQLPHLKVHLDVKGVKQLLHLKVRLDVRGAKQLPHLKVH

SEQ ID NO: 1376 - protein, 7 aa, Shrimp white spot syndrome virus
KQLPHLK

SEQ ID NO: 1377 - protein, 9 aa, Shrimp white spot syndrome virus
KQLPHLKVH

SEQ ID NO: 1378 - protein, 20 aa, Shrimp white spot syndrome virus
KQLPHLKVHLDVKGVKQLLH

SEQ ID NO: 1379 - protein, 35 aa, Shrimp white spot syndrome virus
KQLPHLKVHLDVKGVKQLLHLKVRLDVRGAKQLPH

SEQ ID NO: 1380 - protein, 39 aa, Shrimp white spot syndrome virus
KQLPHLKVHLDVKGVKQLLHLKVRLDVRGAKQLPHLKVH

SEQ ID NO: 1381 - protein, 9 aa, Shrimp white spot syndrome virus
HLKVHLDVK

SEQ ID NO: 1382 - protein, 12 aa, Shrimp white spot syndrome virus
HLKVHLDVKGVK

SEQ ID NO: 1383 - protein, 18 aa, Shrimp white spot syndrome virus
HLKVHLDVKGVKQLLHLK

SEQ ID NO: 1384 - protein, 33 aa, Shrimp white spot syndrome virus
HLKVHLDVKGVKQLLHLKVRLDVRGAKQLPHLK

SEQ ID NO: 1385 - protein, 27 aa, Shrimp white spot syndrome virus
HLKVHLDVKGVKQLLHLKVRLDVRGAK

SEQ ID NO: 1386 - protein, 42 aa, Shrimp white spot syndrome virus
HLKVHLDVKGVKQLLHLKVRLDVRGAKQLPHLKVHLDVRGAK

SEQ ID NO: 1387 - protein, 48 aa, Shrimp white spot syndrome virus
HLKVHLDVKGVKQLLHLKVRLDVRGAKQLPHLKVHLDVRGAKQNPWRK

SEQ ID NO: 1388 - protein, 7 aa, Shrimp white spot syndrome virus
KVHLDVK

SEQ ID NO: 1389 - protein, 10 aa, Shrimp white spot syndrome virus
KVHLDVKGVK

SEQ ID NO: 1390 - protein, 14 aa, Shrimp white spot syndrome virus
KVHLDVKGVKQLLH

SEQ ID NO: 1391 - protein, 29 aa, Shrimp white spot syndrome virus
KVHLDVKGVKQLLHLKVRLDVRGAKQLPH

SEQ ID NO: 1392 - protein, 33 aa, Shrimp white spot syndrome virus
KVHLDVKGVKQLLHLKVRLDVRGAKQLPHLKVH

SEQ ID NO: 1393 - protein, 38 aa, Shrimp white spot syndrome virus
HLDVKGVKQLLHLKVRLDVRGAKQLPHLKVHLDVRGAK

SEQ ID NO: 1394 - protein, 44 aa, Shrimp white spot syndrome virus
HLDVKGVKQLLHLKVRLDVRGAKQLPHLKVHLDVRGAKQNPWRK

SEQ ID NO: 1395 - protein, 50 aa, Shrimp white spot syndrome virus
HLDVKGVKQLLHLKVRLDVRGAKQLPHLKVHLDVRGAKQNPWRKNLCLLK

SEQ ID NO: 1396 - protein, 51 aa, Shrimp white spot syndrome virus
HLDVKGVKQLLHLKVRLDVRGAKQLPHLKVHLDVRGAKQNPWRKNLCLLKK

SEQ ID NO: 1397 - protein, 14 aa, Shrimp white spot syndrome virus
HLDVKGVKQLLHLK

SEQ ID NO: 1398 - protein, 29 aa, Shrimp white spot syndrome virus
HLDVKGVKQLLHLKVRLDVRGAKQLPHLK

SEQ ID NO: 1399 - protein, 23 aa, Shrimp white spot syndrome virus
HLDVKGVKQLLHLKVRLDVRGAK

SEQ ID NO: 1400 - protein, 10 aa, Shrimp white spot syndrome virus
KGVKQLLHLK

SEQ ID NO: 1401 - protein, 23 aa, Shrimp white spot syndrome virus
KGVKQLLHLKVRLDVRGAKQLPH

SEQ ID NO: 1402 - protein, 27 aa, Shrimp white spot syndrome virus
KGVKQLLHLKVRLDVRGAKQLPHLKVH

SEQ ID NO: 1403 - protein, 7 aa, Shrimp white spot syndrome virus
KQLLHLK

SEQ ID NO: 1404 - protein, 20 aa, Shrimp white spot syndrome virus
KQLLHLKVRLDVRGAKQLPH

SEQ ID NO: 1405 - protein, 24 aa, Shrimp white spot syndrome virus
KQLLHLKVRLDVRGAKQLPHLKVH

SEQ ID NO: 1406 - protein, 18 aa, Shrimp white spot syndrome virus
HLKVRLDVRGAKQLPHLK

SEQ ID NO: 1407 - protein, 12 aa, Shrimp white spot syndrome virus
HLKVRLDVRGAK

SEQ ID NO: 1408 - protein, 27 aa, Shrimp white spot syndrome virus
HLKVRLDVRGAKQLPHLKVHLDVRGAK

SEQ ID NO: 1409 - protein, 33 aa, Shrimp white spot syndrome virus
HLKVRLDVRGAKQLPHLKVHLDVRGAKQNPWRK

SEQ ID NO: 1410 - protein, 39 aa, Shrimp white spot syndrome virus
HLKVRLDVRGAKQLPHLKVHLDVRGAKQNPWRKNLCLLK

SEQ ID NO: 1411 - protein, 40 aa, Shrimp white spot syndrome virus
HLKVRLDVRGAKQLPHLKVHLDVRGAKQNPWRKNLCLLKK

SEQ ID NO: 1412 - protein, 43 aa, Shrimp white spot syndrome virus
HLKVRLDVRGAKQLPHLKVHLDVRGAKQNPWRKNLCLLKKNVK

SEQ ID NO: 1413 - protein, 46 aa, Shrimp white spot syndrome virus
HLKVRLDVRGAKQLPHLKVHLDVRGAKQNPWRKNLCLLKKNVKSAK

SEQ ID NO: 1414 - protein, 14 aa, Shrimp white spot syndrome virus
KVRLDVRGAKQLPH

SEQ ID NO: 1415 - protein, 18 aa, Shrimp white spot syndrome virus
KVRLDVRGAKQLPHLKVH

SEQ ID NO: 1416 - protein, 48 aa, Shrimp white spot syndrome virus
KVRLDVRGAKQLPHLKVHLDVRGAKQNPWRKNLCLLKKNVKSAKQLPH

SEQ ID NO: 1417 - protein, 7 aa, Shrimp white spot syndrome virus
KQLPHLK

SEQ ID NO: 1418 - protein, 9 aa, Shrimp white spot syndrome virus
KQLPHLKVH

SEQ ID NO: 1419 - protein, 39 aa, Shrimp white spot syndrome virus; identical to SEQ ID NO: 948

SEQ ID NO: 1420 - protein, 12 aa, Shrimp white spot syndrome virus
HLKVHLDVRGAK

SEQ ID NO: 1421 - protein, 18 aa, Shrimp white spot syndrome virus
HLKVHLDVRGAKQNPWRK

SEQ ID NO: 1422 - protein, 24 aa, Shrimp white spot syndrome virus
HLKVHLDVRGAKQNPWRKNLCLLK

SEQ ID NO: 1423 - protein, 25 aa, Shrimp white spot syndrome virus
HLKVHLDVRGAKQNPWRKNLCLLKK

SEQ ID NO: 1424 - protein, 28 aa, Shrimp white spot syndrome virus
HLKVHLDVRGAKQNPWRKNLCLLKKNVK

SEQ ID NO: 1425 - protein, 31 aa, Shrimp white spot syndrome virus; identical to SEQ ID NO: 954

SEQ ID NO: 1426 - protein, 37 aa, Shrimp white spot syndrome virus; identical to SEQ ID NO: 955

SEQ ID NO: 1427 - protein, 46 aa, Shrimp white spot syndrome virus; identical to SEQ ID NO: 956

SEQ ID NO: 1428 - protein, 10 aa, Shrimp white spot syndrome virus
KVHLDVRGAK

SEQ ID NO: 1429 - protein, 33 aa, Shrimp white spot syndrome virus; identical to SEQ ID NO: 957

SEQ ID NO: 1430 - protein, 48 aa, Shrimp white spot syndrome virus; identical to SEQ ID NO: 958

SEQ ID NO: 1431 - protein, 14 aa, Shrimp white spot syndrome virus
HLDVRGAKQNPWRK

SEQ ID NO: 1432 - protein, 20 aa, Shrimp white spot syndrome virus
HLDVRGAKQNPWRKNLCLLK

SEQ ID NO: 1433 - protein, 21 aa, Shrimp white spot syndrome virus
HLDVRGAKQNPWRKNLCLLKK

SEQ ID NO: 1434 - protein, 24 aa, Shrimp white spot syndrome virus
HLDVRGAKQNPWRKNLCLLKKNVK

SEQ ID NO: 1435 - protein, 27 aa, Shrimp white spot syndrome virus
HLDVRGAKQNPWRKNLCLLKKNVKSAK

SEQ ID NO: 1436 - protein, 33 aa, Shrimp white spot syndrome virus; identical to SEQ ID NO: 965

SEQ ID NO: 1437 - protein, 42 aa, Shrimp white spot syndrome virus; identical to SEQ ID NO: 966

SEQ ID NO: 1438 - protein, 48 aa, Shrimp white spot syndrome virus; identical to SEQ ID NO: 967

SEQ ID NO: 1439 - protein, 24 aa, Shrimp white spot syndrome virus
KQNPWRKNLCLLKKNVKSAKQLPH

SEQ ID NO: 1440 - protein, 39 aa, Shrimp white spot syndrome virus; identical to SEQ ID NO: 969

SEQ ID NO: 1441 - protein, 33 aa, Shrimp white spot syndrome virus; identical to SEQ ID NO: 971

SEQ ID NO: 1442 - protein, 48 aa, Shrimp white spot syndrome virus; identical to SEQ ID NO: 972

SEQ ID NO: 1443 - protein, 18 aa, Shrimp white spot syndrome virus
KNLCLLKKNVKSAKQLPH

SEQ ID NO: 1444 - protein, 12 aa, Shrimp white spot syndrome virus
KKNVKSAKQLPH

SEQ ID NO: 1445 - protein, 27 aa, Shrimp white spot syndrome virus
KKNVKSAKQLPHLKVLLDVRGAKQLPH

SEQ ID NO: 1446 - protein, 42 aa, Shrimp white spot syndrome virus; identical to SEQ ID NO: 974

SEQ ID NO: 1447 - protein, 11 aa, Shrimp white spot syndrome virus
KNVKSAKQLPH

SEQ ID NO: 1448 - protein, 26 aa, Shrimp white spot syndrome virus
KNVKSAKQLPHLKVLLDVRGAKQLPH

SEQ ID NO: 1449 - protein, 41 aa, Shrimp white spot syndrome virus; identical to SEQ ID NO: 979

SEQ ID NO: 1450 - protein, 10 aa, Shrimp white spot syndrome virus
KSAKQLPHLK

SEQ ID NO: 1451 - protein, 23 aa, Shrimp white spot syndrome virus
KSAKQLPHLKVLLDVRGAKQLPH

SEQ ID NO: 1452 - protein, 38 aa, Shrimp white spot syndrome virus; identical to SEQ ID NO: 983

SEQ ID NO: 1453 - protein, 7 aa, Shrimp white spot syndrome virus
KQLPHLK

SEQ ID NO: 1454 - protein, 20 aa, Shrimp white spot syndrome virus
KQLPHLKVLLDVRGAKQLPH

SEQ ID NO: 1455 - protein, 35 aa, Shrimp white spot syndrome virus; identical to SEQ ID NO: 987

SEQ ID NO: 1456 - protein, 12 aa, Shrimp white spot syndrome virus
HLKVLLDVRGAK

SEQ ID NO: 1457 - protein, 18 aa, Shrimp white spot syndrome virus
HLKVLLDVRGAKQLPHLK

SEQ ID NO: 1458 - protein, 27 aa, Shrimp white spot syndrome virus
HLKVLLDVRGAKQLPHLKVLLDVRGAK

SEQ ID NO: 1459 - protein, 33 aa, Shrimp white spot syndrome virus; identical to SEQ ID NO: 992

SEQ ID NO: 1460 - protein, 42 aa, Shrimp white spot syndrome virus
HLKVLLDVRGAKQLPHLKVLLDVRGAKQLPHLKVLLDVRGAK

SEQ ID NO: 1461 - protein, 48 aa, Shrimp white spot syndrome virus
HLKVLLDVRGAKQLPHLKVLLDVRGAKQLPHLKVLLDVRGAKQNPWRK

SEQ ID NO: 1462 - protein, 14 aa, Shrimp white spot syndrome virus
KVLLDVRGAKQLPH

SEQ ID NO: 1463 - protein, 29 aa, Shrimp white spot syndrome virus
KVLLDVRGAKQLPHLKVLLDVRGAKQLPH

SEQ ID NO: 1464 - protein, 7 aa, Shrimp white spot syndrome virus
KQLPHLK

SEQ ID NO: 1465 - protein, 20 aa, Shrimp white spot syndrome virus
KQLPHLKVLLDVRGAKQLPH

SEQ ID NO: 1466 - protein, 12 aa, Shrimp white spot syndrome virus
HLKVLLDVRGAK

SEQ ID NO: 1467 - protein, 18 aa, Shrimp white spot syndrome virus
HLKVLLDVRGAKQLPHLK

SEQ ID NO: 1468 - protein, 27 aa, Shrimp white spot syndrome virus
HLKVLLDVRGAKQLPHLKVLLDVRGAK

SEQ ID NO: 1469 - protein, 33 aa, Shrimp white spot syndrome virus; identical to SEQ ID NO: 1107

SEQ ID NO: 1470 - protein, 39 aa, Shrimp white spot syndrome virus; identical to SEQ ID NO: 1109

SEQ ID NO: 1471 - protein, 40 aa, Shrimp white spot syndrome virus; identical to SEQ ID NO: 1110

SEQ ID NO: 1472 - protein, 43 aa, Shrimp white spot syndrome virus; identical to SEQ ID NO: 1106

SEQ ID NO: 1473 - protein, 46 aa, Shrimp white spot syndrome virus; identical to SEQ ID NO: 1108

SEQ ID NO: 1474 - protein, 48 aa, Shrimp white spot syndrome virus; identical to SEQ ID NO: 1112

SEQ ID NO: 1475 - protein, 14 aa, Shrimp white spot syndrome virus
KVLLDVRGAKQLPH

SEQ ID NO: 1476 - protein, 39 aa, Shrimp white spot syndrome virus; identical to SEQ ID NO: 1114

SEQ ID NO: 1477 - protein, 7 aa, Shrimp white spot syndrome virus
KQLPHLK

SEQ ID NO: 1478 - protein, 12 aa, Shrimp white spot syndrome virus
HLKVLLDVRGAK

SEQ ID NO: 1479 - protein, 18 aa, Shrimp white spot syndrome virus
HLKVLLDVRGAKQNPWRK

SEQ ID NO: 1480 - protein, 24 aa, Shrimp white spot syndrome virus
HLKVLLDVRGAKQNPWRKNLCLLK

SEQ ID NO: 1481 - protein, 25 aa, Shrimp white spot syndrome virus
HLKVLLDVRGAKQNPWRKNLCLLKK

SEQ ID NO: 1482 - protein, 37 aa, Shrimp white spot syndrome virus; identical to SEQ ID NO: 1121

SEQ ID NO: 1483 - protein, 28 aa, Shrimp white spot syndrome virus
HLKVLLDVRGAKQNPWRKNLCLLKKNVK

SEQ ID NO: 1484 - protein, 31 aa, Shrimp white spot syndrome virus; identical to SEQ ID NO: 1118

SEQ ID NO: 1485 - protein, 46 aa, Shrimp white spot syndrome virus; identical to SEQ ID NO: 1122

SEQ ID NO: 1486 - protein, 33 aa, Shrimp white spot syndrome virus; identical to SEQ ID NO: 1123

SEQ ID NO: 1487 - protein, 48 aa, Shrimp white spot syndrome virus; identical to SEQ ID NO: 1124

SEQ ID NO: 1488 - protein, 24 aa, Shrimp white spot syndrome virus
KQNPWRKNLCLLKKNVKSAKQLPH

SEQ ID NO: 1489 - protein, 39 aa, Shrimp white spot syndrome virus; identical to SEQ ID NO: 969

SEQ ID NO: 1490 - protein, 43 aa, Shrimp white spot syndrome virus; identical to SEQ ID NO: 1127

SEQ ID NO: 1491 - protein, 18 aa, Shrimp white spot syndrome virus
KNLCLLKKNVKSAKQLPH

SEQ ID NO: 1492 - protein, 33 aa, Shrimp white spot syndrome virus; identical to SEQ ID NO: 971

SEQ ID NO: 1493 - protein, 37 aa, Shrimp white spot syndrome virus; identical to SEQ ID NO: 1130

SEQ ID NO: 1494 - protein, 12 aa, Shrimp white spot syndrome virus
KKNVKSAKQLPH

SEQ ID NO: 1495 - protein, 27 aa, Shrimp white spot syndrome virus
KKNVKSAKQLPHLKVLLDVRGAKQLPH

SEQ ID NO: 1496 - protein, 31 aa, Shrimp white spot syndrome virus; identical to SEQ ID NO: 667

SEQ ID NO: 1497 - protein, 11 aa, Shrimp white spot syndrome virus
KNVKSAKQLPH

SEQ ID NO: 1498 - protein, 26 aa, Shrimp white spot syndrome virus
KNVKSAKQLPHLKVLLDVRGAKQLPH

SEQ ID NO: 1499 - protein, 30 aa, Shrimp white spot syndrome virus; identical to SEQ ID NO: 1136

SEQ ID NO: 1500 - protein, 10 aa, Shrimp white spot syndrome virus
KSAKQLPHLK

SEQ ID NO: 1501 - protein, 23 aa, Shrimp white spot syndrome virus
KSAKQLPHLKVLLDVRGAKQLPH

SEQ ID NO: 1502 - protein, 27 aa, Shrimp white spot syndrome virus
KSAKQLPHLKVLLDVRGAKQLPHLKVH

SEQ ID NO: 1503 - protein, 7 aa, Shrimp white spot syndrome virus
KQLPHLK

SEQ ID NO: 1504 - protein, 20 aa, Shrimp white spot syndrome virus
KQLPHLKVLLDVRGAKQLPH

SEQ ID NO: 1505 - protein, 24 aa, Shrimp white spot syndrome virus
KQLPHLKVLLDVRGAKQLPHLKVH

SEQ ID NO: 1506 - protein, 49 aa, Shrimp white spot syndrome virus; identical to SEQ ID NO: 1143

SEQ ID NO: 1507 - protein, 12 aa, Shrimp white spot syndrome virus
HLKVLLDVRGAK

SEQ ID NO: 1508 - protein, 18 aa, Shrimp white spot syndrome virus
HLKVLLDVRGAKQLPHLK

SEQ ID NO: 1509 - protein, 27 aa, Shrimp white spot syndrome virus
HLKVLLDVRGAKQLPHLKVHLDVRGAK

SEQ ID NO: 1510 - protein, 37 aa, Shrimp white spot syndrome virus; identical to SEQ ID NO: 1147

SEQ ID NO: 1511 - protein, 14 aa, Shrimp white spot syndrome virus
KVLLDVRGAKQLPH

SEQ ID NO: 1512 - protein, 18 aa, Shrimp white spot syndrome virus
KVLLDVRGAKQLPHLKVH

SEQ ID NO: 1513 - protein, 43 aa, Shrimp white spot syndrome virus; identical to SEQ ID NO: 1150

SEQ ID NO: 1514 - protein, 7 aa, Shrimp white spot syndrome virus
KQLPHLK

SEQ ID NO: 1515 - protein, 9 aa, Shrimp white spot syndrome virus
KQLPHLKVH

SEQ ID NO: 1516 - protein, 34 aa, Shrimp white spot syndrome virus; identical to SEQ ID NO: 1153

SEQ ID NO: 1517 - protein, 46 aa, Shrimp white spot syndrome virus; identical to SEQ ID NO: 1154

SEQ ID NO: 1518 - protein, 12 aa, Shrimp white spot syndrome virus
HLKVHLDVRGAK

SEQ ID NO: 1519 - protein, 22 aa, Shrimp white spot syndrome virus
HLKVHLDVRGAKQQQQLCLPLK

SEQ ID NO: 1520 - protein, 48 aa, Shrimp white spot syndrome virus; identical to SEQ ID NO: 1156

SEQ ID NO: 1521 - protein, 40 aa, Shrimp white spot syndrome virus; identical to SEQ ID NO: 1160

SEQ ID NO: 1522 - protein, 10 aa, Shrimp white spot syndrome virus
KVHLDVRGAK

SEQ ID NO: 1523 - protein, 28 aa, Shrimp white spot syndrome virus
KVHLDVRGAKQQQQLCLPLKTISTSFTH

SEQ ID NO: 1524 - protein, 18 aa, Shrimp white spot syndrome virus
HLDVRGAKQQQQLCLPLK

SEQ ID NO: 1525 - protein, 44 aa, Shrimp white spot syndrome virus; identical to SEQ ID NO: 1162

SEQ ID NO: 1526 - protein, 19 aa, Shrimp white spot syndrome virus
KQQQQLCLPLKTISTSFTH

SEQ ID NO: 1527 - protein, 31 aa, Shrimp white spot syndrome virus; identical to SEQ ID NO: 1164

SEQ ID NO: 1528 - protein, 19 aa, Shrimp white spot syndrome virus
HLLLCLYMEYGKHQNLQVK

SEQ ID NO: 1529 - protein, 8 aa, Shrimp white spot syndrome virus
KHQNLQVK

SEQ ID NO: 1530 - protein, 261 aa, Shrimp white spot syndrome virus
MSNGATISDERLILILDKIVERRGVSNLSELLIHPITKHINELLKNTVRHGDRVYMKDAELDVRSRLEDIKKDCVLKAIEKQGIDVRQIITDYLAKRKLTQNLVHWYRPPISCTDIDEKIQQETGQVGRCSVATYNLRIGGDDGEFTRYDFSIPLGDFKITAKLFRSINDEDVDAVILVSRSDVVNDVLSFEAFNRTGERVVIFFNVIVEGKSKDIDIVCKSRYKHTHILNGESATYAVKRIKRGDTRDDILFAITAFKEE

SEQ ID NO: 1531 - protein, 72 aa, Shrimp white spot syndrome virus
HPITKHINELLKNTVRHGDRVYMKDAELDVRSRLEDIKKDCVLKAIEKQGIDVRQIITDYLAKRKLTQNLVH

SEQ ID NO: 1532 - protein, 44 aa, Shrimp white spot syndrome virus
HPITKHINELLKNTVRHGDRVYMKDAELDVRSRLEDIKKDCVLK

SEQ ID NO: 1533 - protein, 12 aa, Shrimp white spot syndrome virus
HPITKHINELLK

SEQ ID NO: 1534 - protein, 48 aa, Shrimp white spot syndrome virus
HPITKHINELLKNTVRHGDRVYMKDAELDVRSRLEDIKKDCVLKAIEK

SEQ ID NO: 1535 - protein, 8 aa, Shrimp white spot syndrome virus
KHINELLK

SEQ ID NO: 1536 - protein, 13 aa, Shrimp white spot syndrome virus
KHINELLKNTVRH

SEQ ID NO: 1537 - protein, 39 aa, Shrimp white spot syndrome virus
HINELLKNTVRHGDRVYMKDAELDVRSRLEDIKKDCVLK

SEQ ID NO: 1538 - protein, 43 aa, Shrimp white spot syndrome virus
HINELLKNTVRHGDRVYMKDAELDVRSRLEDIKKDCVLKAIEK

SEQ ID NO: 1539 - protein, 28 aa, Shrimp white spot syndrome virus
HGDRVYMKDAELDVRSRLEDIKKDCVLK

SEQ ID NO: 1540 - protein, 32 aa, Shrimp white spot syndrome virus
HGDRVYMKDAELDVRSRLEDIKKDCVLKAIEK

SEQ ID NO: 1541 - protein, 35 aa, Shrimp white spot syndrome virus
KKDCVLKAIEKQGIDVRQIITDYLAKRKLTQNLVH

SEQ ID NO: 1542 - protein, 34 aa, Shrimp white spot syndrome virus
KDCVLKAIEKQGIDVRQIITDYLAKRKLTQNLVH

SEQ ID NO: 1543 - protein, 15 aa, Shrimp white spot syndrome virus
KSKDIDIVCKSRYKH

SEQ ID NO: 1544 - protein, 17 aa, Shrimp white spot syndrome virus
KSKDIDIVCKSRYKHTH

SEQ ID NO: 1545 - protein, 13 aa, Shrimp white spot syndrome virus
KDIDIVCKSRYKH

SEQ ID NO: 1546 - protein, 15 aa, Shrimp white spot syndrome virus
KDIDIVCKSRYKHTH

SEQ ID NO: 1547 - protein, 204 aa, Shrimp white spot syndrome virus
MDLSFTLSVVSAILAITAVIAVFIVIFRYHNTVTKTIETHTGNIETNMDENLRIPVTAEVGSGYFKMTDVSFDSDTLGKIKIRNGKSDAQMKEEDADLVITPVEGRALEVTVGQNLTFEGTFKMWNNTSRKINITGMQMVPKINPSKAFVGSSNTSSFTPVSIDEDEVGTFVCGTTFGAPIAATAGGNLFDMYVHVTYSGTETE

SEQ ID NO: 1548 - protein, 47 aa, Shrimp white spot syndrome virus
HTGNIETNMDENLRIPVTAEVGSGYFKMTDVSFDSDTLGKIKIRNGK

SEQ ID NO: 1549 - protein, 479 aa, Shrimp white spot syndrome virus; identical to SEQ ID NO: 668

SEQ ID NO: 1550 - protein, 449 aa, Shrimp white spot syndrome virus; identical to SEQ ID NO: 669

SEQ ID NO: 1551 - protein, 31 aa, Shrimp white spot syndrome virus; identical to SEQ ID NO: 663

SEQ ID NO: 1552 - protein, 27 aa, Shrimp white spot syndrome virus
KKNVKSAKQLPHLKVHLDVKGVKQLLH

SEQ ID NO: 1553 - protein, 27 aa, Shrimp white spot syndrome virus
KKNVKSAKQLPHLKVLLDVRGAKQLPH

SEQ ID NO: 1554 - protein, 27 aa, Shrimp white spot syndrome virus
KKNVKSAKQLPHLKVLLDVRGAKQLPH

SEQ ID NO: 1555 - protein, 31 aa, Shrimp white spot syndrome virus; identical to SEQ ID NO: 667

SEQ ID NO: 1556 - protein, 2322 aa, Foot-and-mouth disease virus; identical to SEQ ID NO: 157

SEQ ID NO: 1557 - protein, 94 aa, Foot-and-Mouth Disease virus; identical to SEQ ID NO: 124

SEQ ID NO: 1558 - protein, 94 aa, Foot-and-Mouth Disease virus; identical to SEQ ID NO: 124

SEQ ID NO: 1559 - protein, 182 aa, Foot-and-Mouth Disease virus; identical to SEQ ID NO: 130

SEQ ID NO: 1560 - protein, 11 aa, Porcine Circovirus
KNKNHYEVIKK

SEQ ID NO: 1561 - protein, 10 aa, Porcine Circovirus
KNKNHYEVIK

SEQ ID NO: 1562 - protein, 11 aa, Porcine Circovirus
KNKNHYEVIKK

SEQ ID NO: 1563 - protein, 8 aa, Porcine Circovirus
KNHYEVIK

SEQ ID NO: 1564 - protein, 9 aa, Porcine Circovirus
KNHYEVIKK

SEQ ID NO: 1565 - protein, 38 aa, Porcine Circovirus; identical to SEQ ID NO: 219

SEQ ID NO: 1566 - protein, 16 aa, Porcine Circovirus
HLQGFANFVKKQTFNK

SEQ ID NO: 1567 - protein, 18 aa, Porcine Circovirus
HLQGFANFVKKQTFNKAK

SEQ ID NO: 1568 - protein, 38 aa, Porcine Circovirus; identical to SEQ ID NO: 219

SEQ ID NO: 1569 - protein, 26 aa, Porcine Circovirus
KKQTFNKAKWHLGARCHIEKAKGTDH

SEQ ID NO: 1570 - protein, 11 aa, Porcine Circovirus
KKQTFNKAKWH

SEQ ID NO: 1571 - protein, 17 aa, Porcine Circovirus
KKQTFNKAKWHLGARCH

SEQ ID NO: 1572 - protein, 10 aa, Porcine Circovirus
KQTFNKAKWH

SEQ ID NO: 1573 - protein, 16 aa, Porcine Circovirus
KQTFNKAKWHLGARCH

SEQ ID NO: 1574 - protein, 25 aa, Porcine Circovirus
KQTFNKAKWHLGARCHIEKAKGTDH

SEQ ID NO: 1575 - protein, 19 aa, Porcine Circovirus
HLGARCHIEKAKGTDHQNK

SEQ ID NO: 1576 - protein, 13 aa, Porcine Circovirus
HIEKAKGTDHQNK

SEQ ID NO: 1577 - protein, 10 aa, Porcine Circovirus
KAKGTDHQNK

SEQ ID NO: 1578 - protein, 8 aa, Porcine Circovirus
KGTDHQNK

SEQ ID NO: 1579 - protein, 16 aa, Human gastric cancer transforming protein
KTKKGNRVSPTMKVTH

SEQ ID NO: 1580 - protein, 17 aa, Homo sapiens
KHKEKMSKDGKKKKKKS

SEQ ID NO: 1581 - protein, 10 aa, Human immunodeficiency virus type 1
KCFNCGKEGH

SEQ ID NO: 1582 - protein, 11 aa, Human immunodeficiency virus type 1
KVYLAWVPAHK

SEQ ID NO: 1583 - protein, 10 aa, Human immunodeficiency virus type 2
KCWNCGKEGH

SEQ ID NO: 1584 - protein, 4 aa, Tobacco Mosaic Virus
KHKK

SEQ ID NO: 1585 - protein, 7 aa, Homo sapiens
KHHKKKK

SEQ ID NO: 1586 - protein, 8 aa, Homo sapiens
KHHKKKKK

SEQ ID NO: 1587 - protein, 9 aa, Homo sapiens
KHHKKKKKK

SEQ ID NO: 1588 - protein, 10 aa, Homo sapiens
KHHKKKKKKH

SEQ ID NO: 1589 - protein, 11 aa, Homo sapiens
KHHKKKKKKHK

SEQ ID NO: 1590 - protein, 14 aa, Homo sapiens
KHHKKKKKKHKKKH

SEQ ID NO: 1591 - protein, 17 aa, Homo sapiens
KHHKKKKKKHKKKHKKH

SEQ ID NO: 1592 - protein, 18 aa, Homo sapiens
KHHKKKKKKHKKKHKKHH

SEQ ID NO: 1593 - protein, 11 aa, Homo sapiens
HHKKKKKKHKK

SEQ ID NO: 1594 - protein, 10 aa, Homo sapiens
HHKKKKKKHK

SEQ ID NO: 1595 - protein, 12 aa, Homo sapiens
HHKKKKKKHKKK

SEQ ID NO: 1596 - protein, 14 aa, Homo sapiens
HHKKKKKKHKKKHK

SEQ ID NO: 1597 - protein, 15 aa, Homo sapiens
HHKKKKKKHKKKHKK

SEQ ID NO: 1598 - protein, 10 aa, Homo sapiens
HKKKKKKHKK

SEQ ID NO: 1599 - protein, 9 aa, Homo sapiens
HKKKKKKHK

SEQ ID NO: 1600 - protein, 11 aa, Homo sapiens
HKKKKKKHKKK

SEQ ID NO: 1601 - protein, 13 aa, Homo sapiens
HKKKKKKHKKKHK

SEQ ID NO: 1602 - protein, 14 aa, Homo sapiens
HKKKKKKHKKKHKK

SEQ ID NO: 1603 - protein, 9 aa, Homo sapiens
KKKKKKHKK

SEQ ID NO: 1604 - protein, 8 aa, Homo sapiens
KKKKKKHK

SEQ ID NO: 1605 - protein, 10 aa, Homo sapiens
KKKKKKHKKK

SEQ ID NO: 1606 - protein, 11 aa, Homo sapiens
KKKKKKHKKKH

SEQ ID NO: 1607 - protein, 14 aa, Homo sapiens
KKKKKKHKKKHKKH

SEQ ID NO: 1608 - protein, 15 aa, Homo sapiens
KKKKKKHKKKHKKHH

SEQ ID NO: 1609 - protein, 8 aa, Homo sapiens
KKKKKHKK

SEQ ID NO: 1610 - protein, 7 aa, Homo sapiens
KKKKKHK

SEQ ID NO: 1611 - protein, 9 aa, Homo sapiens
KKKKKHKKK

SEQ ID NO: 1612 - protein, 10 aa, Homo sapiens
KKKKKHKKKH

SEQ ID NO: 1613 - protein, 11 aa, Homo sapiens
KKKKKHKKKHK

SEQ ID NO: 1614 - protein, 13 aa, Homo sapiens
KKKKKHKKKHKKH

SEQ ID NO: 1615 - protein, 14 aa, Homo sapiens
KKKKKHKKKHKKHH

SEQ ID NO: 1616 - protein, 7 aa, Homo sapiens
KKKKHKK

SEQ ID NO: 1617 - protein, 8 aa, Homo sapiens
KKKKHKKK

SEQ ID NO: 1618 - protein, 9 aa, Homo sapiens
KKKKHKKKH

SEQ ID NO: 1619 - protein, 10 aa, Homo sapiens
KKKKHKKKHK

SEQ ID NO: 1620 - protein, 11 aa, Homo sapiens
KKKKHKKKHKK

SEQ ID NO: 1621 - protein, 12 aa, Homo sapiens
KKKKHKKKHKKH

SEQ ID NO: 1622 - protein, 13 aa, Homo sapiens
KKKKHKKKHKKHH

SEQ ID NO: 1623 - protein, 7 aa, Homo sapiens
KKKHKKK

SEQ ID NO: 1624 - protein, 8 aa, Homo sapiens
KKKHKKKH

SEQ ID NO: 1625 - protein, 9 aa, Homo sapiens
KKKHKKKHK

SEQ ID NO: 1626 - protein, 10 aa, Homo sapiens
KKKHKKKHKK

SEQ ID NO: 1627 - protein, 11 aa, Homo sapiens
KKKHKKKHKKH

SEQ ID NO: 1628 - protein, 12 aa, Homo sapiens
KKKHKKKHKKHH

SEQ ID NO: 1629 - protein, 8 aa, Homo sapiens
KKHKKKHK

SEQ ID NO: 1630 - protein, 9 aa, Homo sapiens
KKHKKKHKK

SEQ ID NO: 1631 - protein, 10 aa, Homo sapiens
KKHKKKHKKH

SEQ ID NO: 1632 - protein, 11 aa, Homo sapiens
KKHKKKHKKHH

SEQ ID NO: 1633 - protein, 7 aa, Homo sapiens
KHKKKHK

SEQ ID NO: 1634 - protein, 8 aa, Homo sapiens
KHKKKHKK

SEQ ID NO: 1635 - protein, 9 aa, Homo sapiens
KHKKKHKKH

SEQ ID NO: 1636 - protein, 10 aa, Homo sapiens
KHKKKHKKHH

SEQ ID NO: 1637 - protein, 47 aa, Viral hemorrhagic septicemia virus
HLFTRTHDHRVVKAIVAGHHPWGLTMACTVTFCGAEWIKTDLGDLIK

SEQ ID NO: 1638 - protein, 41 aa, Viral hemorrhagic septicemia virus
HDHRVVKAIVAGHHPWGLTMACTVTFCGAEWIKTDLGDLIK

SEQ ID NO: 1639 - protein, 49 aa, Viral hemorrhagic septicemia virus
HDHRVVKAIVAGHHPWGLTMACTVTFCGAEWIKTDLGDLIKVTGQGGAK

SEQ ID NO: 1640 - protein, 50 aa, Viral hemorrhagic septicemia virus
HDHRVVKAIVAGHHPWGLTMACTVTFCGAEWIKTDLGDLIKVTGQGGAKK

SEQ ID NO: 1641 - protein, 47 aa, Viral hemorrhagic septicemia virus
HRVVKAIVAGHHPWGLTMACTVTFCGAEWIKTDLGDLIKVTGQGGAK

SEQ ID NO: 1642 - protein, 48 aa, Viral hemorrhagic septicemia virus
HRVVKAIVAGHHPWGLTMACTVTFCGAEWIKTDLGDLIKVTGQGGAKK

SEQ ID NO: 1643 - protein, 39 aa, Viral hemorrhagic septicemia virus
HRVVKAIVAGHHPWGLTMACTVTFCGAEWIKTDLGDLIK

SEQ ID NO: 1644 - protein, 29 aa, Viral hemorrhagic septicemia virus
HHPWGLTMACTVTFCGAEWIKTDLGDLIK

SEQ ID NO: 1645 - protein, 37 aa, Viral hemorrhagic septicemia virus
HHPWGLTMACTVTFCGAEWIKTDLGDLIKVTGQGGAK

SEQ ID NO: 1646 - protein, 38 aa, Viral hemorrhagic septicemia virus
HHPWGLTMACTVTFCGAEWIKTDLGDLIKVTGQGGAKK

SEQ ID NO: 1647 - protein, 43 aa, Viral hemorrhagic septicemia virus
HHPWGLTMACTVTFCGAEWIKTDLGDLIKVTGQGGAKKLSPRK

SEQ ID NO: 1648 - protein, 28 aa, Viral hemorrhagic septicemia virus
HPWGLTMACTVTFCGAEWIKTDLGDLIK

SEQ ID NO: 1649 - protein, 36 aa, Viral hemorrhagic septicemia virus
HPWGLTMACTVTFCGAEWIKTDLGDLIKVTGQGGAK

SEQ ID NO: 1650 - protein, 37 aa, Viral hemorrhagic septicemia virus
HPWGLTMACTVTFCGAEWIKTDLGDLIKVTGQGGAKK

SEQ ID NO: 1651 - protein, 42 aa, Viral hemorrhagic septicemia virus
HPWGLTMACTVTFCGAEWIKTDLGDLIKVTGQGGAKKLSPRK

SEQ ID NO: 1652 - protein, 43 aa, Viral hemorrhagic septicemia virus
KTDLGDLIKVTGQGGAKKLSPRKCVNTDIQMRGATDDFSYLNH

SEQ ID NO: 1653 - protein, 35 aa, Viral hemorrhagic septicemia virus
KVTGQGGAKKLSPRKCVNTDIQMRGATDDFSYLNH

SEQ ID NO: 1654 - protein, 50 aa, Viral hemorrhagic septicemia virus
KVTGQGGAKKLSPRKCVNTDIQMRGATDDFSYLNHLITNMAQRTECLDAH

SEQ ID NO: 1655 - protein, 42 aa, Viral hemorrhagic septicemia virus
KKLSPRKCVNTDIQMRGATDDFSYLNHLITNMAQRTECLDAH

SEQ ID NO: 1656 - protein, 27 aa, Viral hemorrhagic septicemia virus
KKLSPRKCVNTDIQMRGATDDFSYLNH

SEQ ID NO: 1657 - protein, 42 aa, Viral hemorrhagic septicemia virus
HLITNMAQRTECLDAHSDITASGKISSFLLSKFRPSHPGPGK

SEQ ID NO: 1658 - protein, 32 aa, Viral hemorrhagic septicemia virus
HLITNMAQRTECLDAHSDITASGKISSFLLSK

SEQ ID NO: 1659 - protein, 27 aa, Viral hemorrhagic septicemia virus
HSDITASGKISSFLLSKFRPSHPGPGK

SEQ ID NO: 1660 - protein, 17 aa, Viral hemorrhagic septicemia virus
HSDITASGKISSFLLSK

SEQ ID NO: 1661 - protein, 21 aa, Viral hemorrhagic septicemia virus
KISSFLLSKFRPSHPGPGKAH

SEQ ID NO: 1662 - protein, 14 aa, Viral hemorrhagic septicemia virus
KISSFLLSKFRPSH

SEQ ID NO: 1663 - protein, 11 aa, Viral hemorrhagic septicemia virus
KFRPSHPGPGK

SEQ ID NO: 1664 - protein, 90 aa, Human influenza A virus
MEQEQDTPWTQSTEHTNIQKKGSGQQTRKLERPNLTQLMDHYLRIMSQVDMHKQTVSWKQWLSLKNPTQGSLKPRVLKRWKLFNKQGWTD

SEQ ID NO: 1665 - protein, 71 aa, Human influenza A virus
HTNIQKKGSGQQTRKLERPNLTQLMDHYLRIMSQVDMHKQTVSWKQWLSLKNPTQGSLKPRVLKRWKLFNK

SEQ ID NO: 1666 - protein, 45 aa, Human influenza A virus
HTNIQKKGSGQQTRKLERPNLTQLMDHYLRIMSQVDMHKQTVSWK

SEQ ID NO: 1667 - protein, 15 aa, Human influenza A virus
HTNIQKKGSGQQTRK

SEQ ID NO: 1668 - protein, 51 aa, Human influenza A virus
HTNIQKKGSGQQTRKLERPNLTQLMDHYLRIMSQVDMHKQTVSWKQWLSLK

SEQ ID NO: 1669 - protein, 33 aa, Human influenza A virus
KKGSGQQTRKLERPNLTQLMDHYLRIMSQVDMH

SEQ ID NO: 1670 - protein, 22 aa, Human influenza A virus
KKGSGQQTRKLERPNLTQLMDH

SEQ ID NO: 1671 - protein, 32 aa, Human influenza A virus
KGSGQQTRKLERPNLTQLMDHYLRIMSQVDMH

SEQ ID NO: 1672 - protein, 21 aa, Human influenza A virus
KGSGQQTRKLERPNLTQLMDH

SEQ ID NO: 1673 - protein, 45 aa, Human influenza A virus
HYLRIMSQVDMHKQTVSWKQWLSLKNPTQGSLKPRVLKRWKLFNK

SEQ ID NO: 1674 - protein, 33 aa, Human influenza A virus
HYLRIMSQVDMHKQTVSWKQWLSLKNPTQGSLK

SEQ ID NO: 1675 - protein, 19 aa, Human influenza A virus
HYLRIMSQVDMHKQTVSWK

SEQ ID NO: 1676 - protein, 41 aa, Human influenza A virus
HYLRIMSQVDMHKQTVSWKQWLSLKNPTQGSLKPRVLKRWK

SEQ ID NO: 1677 - protein, 25 aa, Human influenza A virus
HYLRIMSQVDMHKQTVSWKQWLSLK

SEQ ID NO: 1678 - protein, 8 aa, Human influenza A virus
HKQTVSWK

SEQ ID NO: 1679 - protein, 30 aa, Human influenza A virus
HKQTVSWKQWLSLKNPTQGSLKPRVLKRWK

SEQ ID NO: 1680 - protein, 14 aa, Human influenza A virus
HKQTVSWKQWLSLK

SEQ ID NO: 1681 - protein, 34 aa, Human influenza A virus
HKQTVSWKQWLSLKNPTQGSLKPRVLKRWKLFNK

SEQ ID NO: 1682 - protein, 22 aa, Human influenza A virus
HKQTVSWKQWLSLKNPTQGSLK

SEQ ID NO: 1683 - protein, 757 aa, Human influenza A virus
MDVNPTLLFLKVPVQNAISTTFPYTGDPPYSHGTGTGYTMDTVNRTHQYSEKGKWTTNTETGAPQLNPIDGPLPEDNEPSGYAQTDCVLEAMAFLEESHPGIFENSCLETMEIVQQTRVDKLTQGRQTYDWTLNRNQPAATALANTIEIFRSNGLTASESGRLIDFLKDVMESMDKEEMEITTHFQRKRRVRDNMTKKMVTQRTIGKKKQRLNKKSYLIRALTLNTMTKDAERGKLKRRAIATPGMQIRGFVYFVETLARSICEKLEQSGLPVGGNEKKAKLANVVRKMMTNSQDTELSFTITGDNTKWNENQNPRMFLAMITYITRNQPEWFRNVLSIAPIMFSNKMARLGKGYMFESKSMKLRTQIPAEMLANIDLKYFNELTKKKIEKIRPLLIDGTASLSPGMMMGMFNMLSTVLGVSILNLGQKRYTKTTYWWDGLQSSDDFALIVNAPNHEGIQAGVDRFYRTCKLVGINMSKKKSYINRTGTFEFTSFFYRYGFVANFSMELPSFGVSGINESADMSIGVTVIKNNMINNDLGPATAQMALQLFIKDYRYTYRCHRGDTQIQTRRSFELKKLWEQTRSKAGLLVSDGGPNLYNIRNLHIPEVCLKWELMDEDYQGRLCNPLNPFVSHKEIESVNNAVVMPAHGPAKSMEYDAVATTHSWIPKRNRSILNTSQRGILEDEQMYQKCCNLFEKFFPSSSYRRPVGISSMVEAMVSRARIDARIDFESGRIKKEEFAEIMKICSTIEELRRQK

SEQ ID NO: 1684 - protein, 48 aa, Human influenza A virus
KDVMESMDKEEMEITTHFQRKRRVRDNMTKKMVTQRTIGKKKQRLNKK

SEQ ID NO: 1685 - protein, 17 aa, Human influenza A virus
KDVMESMDKEEMEITTH

SEQ ID NO: 1686 - protein, 14 aa, Human influenza A virus
HFQRKRRVRDNMTK

SEQ ID NO: 1687 - protein, 24 aa, Human influenza A virus
HFQRKRRVRDNMTKKMVTQRTIGK

SEQ ID NO: 1688 - protein, 15 aa, Human influenza A virus
HFQRKRRVRDNMTKK

SEQ ID NO: 1689 - protein, 25 aa, Human influenza A virus
HFQRKRRVRDNMTKKMVTQRTIGKK

SEQ ID NO: 1690 - protein, 31 aa, Human influenza A virus
HFQRKRRVRDNMTKKMVTQRTIGKKKQRLNK

SEQ ID NO: 1691 - protein, 32 aa, Human influenza A virus
HFQRKRRVRDNMTKKMVTQRTIGKKKQRLNKK

SEQ ID NO: 1692 - protein, 24 aa, Human influenza A virus
HEGIQAGVDRFYRTCKLVGINMSK

SEQ ID NO: 1693 - protein, 25 aa, Human influenza A virus
HEGIQAGVDRFYRTCKLVGINMSKK

SEQ ID NO: 1694 - protein, 26 aa, Human influenza A virus
HEGIQAGVDRFYRTCKLVGINMSKKK

SEQ ID NO: 1695 - protein, 25 aa, Human influenza A virus
HRGDTQIQTRRSFELKKLWEQTRSK

SEQ ID NO: 1696 - protein, 29 aa, Human influenza A virus
KKLWEQTRSKAGLLVSDGGPNLYNIRNLH

SEQ ID NO: 1697 - protein, 28 aa, Human influenza A virus
KLWEQTRSKAGLLVSDGGPNLYNIRNLH

SEQ ID NO: 1698 - protein, 50 aa, Human influenza A virus
HGPAKSMEYDAVATTHSWIPKRNRSILNTSQRGILEDEQMYQKCCNLFEK

SEQ ID NO: 1699 - protein, 35 aa, Human influenza A virus
HSWIPKRNRSILNTSQRGILEDEQMYQKCCNLFEK

SEQ ID NO: 1700 - protein, 90 aa, Human influenza A virus
MEQGQDTPWIQSTEHTNIQKRGSGQQTQRLEHPNSTRLMGHYLRIMSPVGMHKQIVYWKQWLSLKNPTQGSLKTRVLKRWKLFSKQEWIN

SEQ ID NO: 1701 - protein, 71 aa, Human influenza A virus
HTNIQKRGSGQQTQRLEHPNSTRLMGHYLRIMSPVGMHKQIVYWKQWLSLKNPTQGSLKTRVLKRWKLFSK

SEQ ID NO: 1702 - protein, 45 aa, Human influenza A virus
HTNIQKRGSGQQTQRLEHPNSTRLMGHYLRIMSPVGMHKQIVYWK

SEQ ID NO: 1703 - protein, 51 aa, Human influenza A virus
HTNIQKRGSGQQTQRLEHPNSTRLMGHYLRIMSPVGMHKQIVYWKQWLSLK

SEQ ID NO: 1704 - protein, 28 aa, Human influenza A virus
HPNSTRLMGHYLRIMSPVGMHKQIVYWK

SEQ ID NO: 1705 - protein, 50 aa, Human influenza A virus
HPNSTRLMGHYLRIMSPVGMHKQIVYWKQWLSLKNPTQGSLKTRVLKRWK

SEQ ID NO: 1706 - protein, 34 aa, Human influenza A virus
HPNSTRLMGHYLRIMSPVGMHKQIVYWKQWLSLK

SEQ ID NO: 1707 - protein, 42 aa, Human influenza A virus
HPNSTRLMGHYLRIMSPVGMHKQIVYWKQWLSLKNPTQGSLK

SEQ ID NO: 1708 - protein, 45 aa, Human influenza A virus
HYLRIMSPVGMHKQIVYWKQWLSLKNPTQGSLKTRVLKRWKLFSK

SEQ ID NO: 1709 - protein, 33 aa, Human influenza A virus
HYLRIMSPVGMHKQIVYWKQWLSLKNPTQGSLK

SEQ ID NO: 1710 - protein, 19 aa, Human influenza A virus
HYLRIMSPVGMHKQIVYWK

SEQ ID NO: 1711 - protein, 41 aa, Human influenza A virus
HYLRIMSPVGMHKQIVYWKQWLSLKNPTQGSLKTRVLKRWK

SEQ ID NO: 1712 - protein, 25 aa, Human influenza A virus
HYLRIMSPVGMHKQIVYWKQWLSLK

SEQ ID NO: 1713 - protein, 8 aa, Human influenza A virus
HKQIVYWK

SEQ ID NO: 1714 - protein, 30 aa, Human influenza A virus; identical to SEQ ID NO: 29

SEQ ID NO: 1715 - protein, 14 aa, Human influenza A virus
HKQIVYWKQWLSLK

SEQ ID NO: 1716 - protein, 34 aa, Human influenza A virus
HKQIVYWKQWLSLKNPTQGSLKTRVLKRWKLFSK

SEQ ID NO: 1717 - protein, 22 aa, Human influenza A virus
HKQIVYWKQWLSLKNPTQGSLK

SEQ ID NO: 1718 - protein, 90 aa, Human influenza A virus; identical to SEQ ID NO: 1700

SEQ ID NO: 1719 - protein, 71 aa, Human influenza A virus; identical to SEQ ID NO: 1701

SEQ ID NO: 1720 - protein, 71 aa, Human influenza A virus; identical to SEQ ID NO: 1701

SEQ ID NO: 1721 - protein, 71 aa, Human influenza A virus; identical to SEQ ID NO: 1701

SEQ ID NO: 1722 - protein, 90 aa, Human influenza A virus; identical to SEQ ID NO: 15

SEQ ID NO: 1723 - protein, 71 aa, Human influenza A virus
HTNIQKRGSGQQTQRLEHPNSTRLMDHYLRIMSPVDMHKQIVYWKQWLSLKNPTQGSLKTRVLKRWKLFNK

SEQ ID NO: 1724 - protein, 45 aa, Human influenza A virus; identical to SEQ ID NO: 34

SEQ ID NO: 1725 - protein, 51 aa, Human influenza A virus; identical to SEQ ID NO: 18

SEQ ID NO: 1726 - protein, 28 aa, Human influenza A virus
HPNSTRLMDHYLRIMSPVDMHKQIVYWK

SEQ ID NO: 1727 - protein, 50 aa, Human influenza A virus; identical to SEQ ID NO: 20

SEQ ID NO: 1728 - protein, 34 aa, Human influenza A virus; identical to SEQ ID NO: 38

SEQ ID NO: 1729 - protein, 42 aa, Human influenza A virus; identical to SEQ ID NO: 22

SEQ ID NO: 1730 - protein, 45 aa, Human influenza A virus; identical to SEQ ID NO: 14

SEQ ID NO: 1731 - protein, 33 aa, Human influenza A virus; identical to SEQ ID NO: 24

SEQ ID NO: 1732 - protein, 19 aa, Human influenza A virus
HYLRIMSPVDMHKQIVYWK

SEQ ID NO: 1733 - protein, 41 aa, Human influenza A virus; identical to SEQ ID NO: 26

SEQ ID NO: 1734 - protein, 25 aa, Human influenza A virus
HYLRIMSPVDMHKQIVYWKQWLSLK

SEQ ID NO: 1735 - protein, 8 aa, Human influenza A virus
HKQIVYWK

SEQ ID NO: 1736 - protein, 30 aa, Human influenza A virus; identical to SEQ ID NO: 29

SEQ ID NO: 1737 - protein, 14 aa, Human influenza A virus
HKQIVYWKQWLSLK

SEQ ID NO: 1738 - protein, 34 aa, Human influenza A virus; identical to SEQ ID NO: 31

SEQ ID NO: 1739 - protein, 22 aa, Human influenza A virus
HKQIVYWKQWLSLKNPTQGSLK

SEQ ID NO: 1740 - protein, 1045 aa, Homo sapiens
MGSQPPLGSPLSREEGEAPPPAPASEGRRRSRRVRLRGSCRHRPSFLGCRELAASAPARPAPASSEIMASAAKEFKMDNFSPKAGTSKLQQTVPADASPDSKCPICLDRFDNVSYLDRCLHKFCFRCVQEWSKNKAECPLCKQPFDSIFHSVRAEDDFKEYVLRPSYNGSFVTPDRRFRYRTTLTRERNASVYSPSGPVNRRTTTPPDSGVLFEGLGISTRPRDVEIPQFMRQIAVRRPTTADERSLRKIQEQDIINFRRTLYRAGARVRNIEDGGRYRDISAEFFRRNPACLHRLVPWLKRELTVLFGAHGSLVNIVQHIIMSNVTRYDLESQAFVSDLRPFLLNRTEHFIHEFISFARSPFNMAAFDQHANYDCPAPSYEEGSHSDSSVITISPDEAETQELDINVATVSQAPWDDETPGPSYSSSEQVHVTMSSLLNTSDSSDEELVTGGATSQIQGVQTNDDLNNDSDDSSDNCVIVGFVKPLAERTPELVELSSDSEDLGSYEKMETVKTQEQEQSYSSGDSDVSRCSSPHSVLGKDEQINKGHCDSSTRIKSKKEEKRSTSLSSPRNLNSSVRGDRVYSPYNHRHRKRGRSRSSDSRSQSRSGHDQKNHRKHHGKKRMKSKRSRSRESSRPRGRRDKKRSRTRDSSWSRRSQTLSLSSESTSRSRSRSSDHGKRRSRSRNRDRYYLRNNYGSRYKWEYTYYSRNKDRDGYESSYRRRTLSRAHYSRQSSSPEFRVQSFSERTNARKKNNHSERKYYYYERHRSRSLSSNRSRTASTGTDRVRNEKPGGKRKYKTRHLEGTNEVAQPSREFASKAKDSHYQKSSSKLDGNYKNESDTFSDSRSSDRETKHKRRKRKTRSLSVEIVYEGKATDTTKHHKKKKKKHKKKHKKHHGDNASRSPVVITIDSDSDKDSEVKEDTECDNSGPQDPLQNEFLAPSLEPFETKDVVTIEAEFGVLDKECDIATLSNNLNNANKTVDNIPPLAASVEQTLDVREESTFVSDLENQPSNIVSLQTEPSRQLPSPRTSLMSVCLGRDCDMS

SEQ ID NO: 1741 - protein, 18 aa, Homo sapiens
KHHKKKKKKHKKKHKKHH

SEQ ID NO: 1742 - protein, 42 aa, Homo sapiens
HRPSFLGCRELAASAPARPAPASSEIMASAAKEFKMDNFSPK

SEQ ID NO: 1743 - protein, 49 aa, Homo sapiens
KEFKMDNFSPKAGTSKLQQTVPADASPDSKCPICLDRFDNVSYLDRCLH

SEQ ID NO: 1744 - protein, 46 aa, Homo sapiens
KMDNFSPKAGTSKLQQTVPADASPDSKCPICLDRFDNVSYLDRCLH

SEQ ID NO: 1745 - protein, 22 aa, Homo sapiens
HKFCFRCVQEWSKNKAECPLCK

SEQ ID NO: 1746 - protein, 18 aa, Homo sapiens
KNKAECPLCKQPFDSIFH

SEQ ID NO: 1747 - protein, 16 aa, Homo sapiens
KAECPLCKQPFDSIFH

SEQ ID NO: 1748 - protein, 12 aa, Homo sapiens
HSVLGKDEQINK

SEQ ID NO: 1749 - protein, 22 aa, Homo sapiens
HSVLGKDEQINKGHCDSSTRIK

SEQ ID NO: 1750 - protein, 28 aa, Homo sapiens
HSVLGKDEQINKGHCDSSTRIKSKKEEK

SEQ ID NO: 1751 - protein, 9 aa, Homo sapiens
KDEQINKGH

SEQ ID NO: 1752 - protein, 49 aa, Homo sapiens
KDEQINKGHCDSSTRIKSKKEEKRSTSLSSPRNLNSSVRGDRVYSPYNH

SEQ ID NO: 1753 - protein, 51 aa, Homo sapiens
KDEQINKGHCDSSTRIKSKKEEKRSTSLSSPRNLNSSVRGDRVYSPYNHRH

SEQ ID NO: 1754 - protein, 43 aa, Homo sapiens
KGHCDSSTRIKSKKEEKRSTSLSSPRNLNSSVRGDRVYSPYNH

SEQ ID NO: 1755 - protein, 45 aa, Homo sapiens
KGHCDSSTRIKSKKEEKRSTSLSSPRNLNSSVRGDRVYSPYNHRH

SEQ ID NO: 1756 - protein, 11 aa, Homo sapiens
KGHCDSSTRIK

SEQ ID NO: 1757 - protein, 15 aa, Homo sapiens
HCDSSTRIKSKKEEK

SEQ ID NO: 1758 - protein, 33 aa, Homo sapiens
KSKKEEKRSTSLSSPRNLNSSVRGDRVYSPYNH

SEQ ID NO: 1759 - protein, 35 aa, Homo sapiens
KSKKEEKRSTSLSSPRNLNSSVRGDRVYSPYNHRH

SEQ ID NO: 1760 - protein, 37 aa, Homo sapiens
HRHRKRGRSRSSDSRSQSRSGHDQKNHRKHHGKKRMK

SEQ ID NO: 1761 - protein, 39 aa, Homo sapiens
HRHRKRGRSRSSDSRSQSRSGHDQKNHRKHHGKKRMKSK

SEQ ID NO: 1762 - protein, 33 aa, Homo sapiens
HRHRKRGRSRSSDSRSQSRSGHDQKNHRKHHGK

SEQ ID NO: 1763 - protein, 34 aa, Homo sapiens
HRHRKRGRSRSSDSRSQSRSGHDQKNHRKHHGKK

SEQ ID NO: 1764 - protein, 31 aa, Homo sapiens
HRKRGRSRSSDSRSQSRSGHDQKNHRKHHGK

SEQ ID NO: 1765 - protein, 32 aa, Homo sapiens
HRKRGRSRSSDSRSQSRSGHDQKNHRKHHGKK

SEQ ID NO: 1766 - protein, 35 aa, Homo sapiens
HRKRGRSRSSDSRSQSRSGHDQKNHRKHHGKKRMK

SEQ ID NO: 1767 - protein, 37 aa, Homo sapiens
HRKRGRSRSSDSRSQSRSGHDQKNHRKHHGKKRMKSK

SEQ ID NO: 1768 - protein, 12 aa, Homo sapiens
HDQKNHRKHHGK

SEQ ID NO: 1769 - protein, 13 aa, Homo sapiens
HDQKNHRKHHGKK

SEQ ID NO: 1770 - protein, 16 aa, Homo sapiens
HDQKNHRKHHGKKRMK

SEQ ID NO: 1771 - protein, 18 aa, Homo sapiens
HDQKNHRKHHGKKRMKSK

SEQ ID NO: 1772 - protein, 9 aa, Homo sapiens
KNHRKHHGK

SEQ ID NO: 1773 - protein, 10 aa, Homo sapiens
KNHRKHHGKK

SEQ ID NO: 1774 - protein, 11 aa, Homo sapiens
HRKHHGKKRMK

SEQ ID NO: 1775 - protein, 13 aa, Homo sapiens
HRKHHGKKRMKSK

SEQ ID NO: 1776 - protein, 9 aa, Homo sapiens
KHHGKKRMK

SEQ ID NO: 1777 - protein, 11 aa, Homo sapiens
KHHGKKRMKSK

SEQ ID NO: 1778 - protein, 10 aa, Homo sapiens
HHGKKRMKSK

SEQ ID NO: 1779 - protein, 9 aa, Homo sapiens
HGKKRMKSK

SEQ ID NO: 1780 - protein, 35 aa, Homo sapiens
HGKRRSRSRNRDRYYLRNNYGSRYKWEYTYYSRNK

SEQ ID NO: 1781 - protein, 29 aa, Homo sapiens
KWEYTYYSRNKDRDGYESSYRRRTLSRAH

SEQ ID NO: 1782 - protein, 32 aa, Homo sapiens
HYSRQSSSPEFRVQSFSERTNARKKNNHSERK

SEQ ID NO: 1783 - protein, 51 aa, Homo sapiens
KKNNHSERKYYYYERHRSRSLSSNRSRTASTGTDRVRNEKPGGKRKYKTRH

SEQ ID NO: 1784 - protein, 9 aa, Homo sapiens
KKNNHSERK

SEQ ID NO: 1785 - protein, 16 aa, Homo sapiens
KKNNHSERKYYYYERH

SEQ ID NO: 1786 - protein, 8 aa, Homo sapiens
KNNHSERK

SEQ ID NO: 1787 - protein, 15 aa, Homo sapiens
KNNHSERKYYYYERH

SEQ ID NO: 1788 - protein, 50 aa, Homo sapiens
KNNHSERKYYYYERHRSRSLSSNRSRTASTGTDRVRNEKPGGKRKYKTRH

SEQ ID NO: 1789 - protein, 42 aa, Homo sapiens
HSERKYYYYERHRSRSLSSNRSRTASTGTDRVRNEKPGGKRK

SEQ ID NO: 1790 - protein, 44 aa, Homo sapiens
HSERKYYYYERHRSRSLSSNRSRTASTGTDRVRNEKPGGKRKYK

SEQ ID NO: 1791 - protein, 31 aa, Homo sapiens
HRSRSLSSNRSRTASTGTDRVRNEKPGGKRK

SEQ ID NO: 1792 - protein, 33 aa, Homo sapiens
HRSRSLSSNRSRTASTGTDRVRNEKPGGKRKYK

SEQ ID NO: 1793 - protein, 12 aa, Homo sapiens
KPGGKRKYKTRH

SEQ ID NO: 1794 - protein, 34 aa, Homo sapiens
KPGGKRKYKTRHLEGTNEVAQPSREFASKAKDSH

SEQ ID NO: 1795 - protein, 26 aa, Homo sapiens
HLEGTNEVAQPSREFASKAKDSHYQK

SEQ ID NO: 1796 - protein, 30 aa, Homo sapiens
HLEGTNEVAQPSREFASKAKDSHYQKSSSK

SEQ ID NO: 1797 - protein, 36 aa, Homo sapiens
HLEGTNEVAQPSREFASKAKDSHYQKSSSKLDGNYK

SEQ ID NO: 1798 - protein, 9 aa, Homo sapiens
KAKDSHYQK

SEQ ID NO: 1799 - protein, 37 aa, Homo sapiens
KAKDSHYQKSSSKLDGNYKNESDTFSDSRSSDRETKH

SEQ ID NO: 1800 - protein, 35 aa, Homo sapiens
KDSHYQKSSSKLDGNYKNESDTFSDSRSSDRETKH

SEQ ID NO: 1801 - protein, 7 aa, Homo sapiens
KDSHYQK

SEQ ID NO: 1802 - protein, 11 aa, Homo sapiens
KDSHYQKSSSK

SEQ ID NO: 1803 - protein, 14 aa, Homo sapiens
HYQKSSSKLDGNYK

SEQ ID NO: 1804 - protein, 38 aa, Homo sapiens
HYQKSSSKLDGNYKNESDTFSDSRSSDRETKHKRRKRK

SEQ ID NO: 1805 - protein, 29 aa, Homo sapiens
KSSSKLDGNYKNESDTFSDSRSSDRETKH

SEQ ID NO: 1806 - protein, 51 aa, Homo sapiens
KLDGNYKNESDTFSDSRSSDRETKHKRRKRKTRSLSVEIVYEGKATDTTKH

SEQ ID NO: 1807 - protein, 25 aa, Homo sapiens
KLDGNYKNESDTFSDSRSSDRETKH

SEQ ID NO: 1808 - protein, 28 aa, Homo sapiens
KHKRRKRKTRSLSVEIVYEGKATDTTKH

SEQ ID NO: 1809 - protein, 29 aa, Homo sapiens
KHKRRKRKTRSLSVEIVYEGKATDTTKHH

SEQ ID NO: 1810 - protein, 36 aa, Homo sapiens
KHKRRKRKTRSLSVEIVYEGKATDTTKHHKKKKKKH

SEQ ID NO: 1811 - protein, 40 aa, Homo sapiens
KHKRRKRKTRSLSVEIVYEGKATDTTKHHKKKKKKHKKKH

SEQ ID NO: 1812 - protein, 43 aa, Homo sapiens
KHKRRKRKTRSLSVEIVYEGKATDTTKHHKKKKKKHKKKHKKH

SEQ ID NO: 1813 - protein, 44 aa, Homo sapiens
KHKRRKRKTRSLSVEIVYEGKATDTTKHHKKKKKKHKKKHKKHH

SEQ ID NO: 1814 - protein, 8 aa, Homo sapiens
KHKRRKRK

SEQ ID NO: 1815 - protein, 26 aa, Homo sapiens
HKRRKRKTRSLSVEIVYEGKATDTTK

SEQ ID NO: 1816 - protein, 29 aa, Homo sapiens
HKRRKRKTRSLSVEIVYEGKATDTTKHHK

SEQ ID NO: 1817 - protein, 30 aa, Homo sapiens
HKRRKRKTRSLSVEIVYEGKATDTTKHHKK

SEQ ID NO: 1818 - protein, 32 aa, Homo sapiens
HKRRKRKTRSLSVEIVYEGKATDTTKHHKKKK

SEQ ID NO: 1819 - protein, 33 aa, Homo sapiens
HKRRKRKTRSLSVEIVYEGKATDTTKHHKKKKK

SEQ ID NO: 1820 - protein, 34 aa, Homo sapiens
HKRRKRKTRSLSVEIVYEGKATDTTKHHKKKKKK

SEQ ID NO: 1821 - protein, 37 aa, Homo sapiens
HKRRKRKTRSLSVEIVYEGKATDTTKHHKKKKKKHKK

SEQ ID NO: 1822 - protein, 36 aa, Homo sapiens
HKRRKRKTRSLSVEIVYEGKATDTTKHHKKKKKKHK

SEQ ID NO: 1823 - protein, 38 aa, Homo sapiens
HKRRKRKTRSLSVEIVYEGKATDTTKHHKKKKKKHKKK

SEQ ID NO: 1824 - protein, 40 aa, Homo sapiens
HKRRKRKTRSLSVEIVYEGKATDTTKHHKKKKKKHKKKHK

SEQ ID NO: 1825 - protein, 41 aa, Homo sapiens
HKRRKRKTRSLSVEIVYEGKATDTTKHHKKKKKKHKKKHKK

SEQ ID NO: 1826 - protein, 8 aa, Homo sapiens
KATDTTKH

SEQ ID NO: 1827 - protein, 9 aa, Homo sapiens
KATDTTKHH

SEQ ID NO: 1828 - protein, 10 aa, Homo sapiens
KATDTTKHHK

SEQ ID NO: 1829 - protein, 11 aa, Homo sapiens
KATDTTKHHKK

SEQ ID NO: 1830 - protein, 16 aa, Homo sapiens
KATDTTKHHKKKKKKH

SEQ ID NO: 1831 - protein, 20 aa, Homo sapiens
KATDTTKHHKKKKKKHKKKH

SEQ ID NO: 1832 - protein, 23 aa, Homo sapiens
KATDTTKHHKKKKKKHKKKHKKH

SEQ ID NO: 1833 - protein, 24 aa, Homo sapiens
KATDTTKHHKKKKKKHKKKHKKHH

SEQ ID NO: 1834 - protein, 7 aa, Homo sapiens
KHHKKKK

SEQ ID NO: 1835 - protein, 8 aa, Homo sapiens
KHHKKKKK

SEQ ID NO: 1836 - protein, 9 aa, Homo sapiens
KHHKKKKKK

SEQ ID NO: 1837 - protein, 10 aa, Homo sapiens
KHHKKKKKKH

SEQ ID NO: 1838 - protein, 11 aa, Homo sapiens
KHHKKKKKKHK

SEQ ID NO: 1839 - protein, 14 aa, Homo sapiens
KHHKKKKKKHKKKH

SEQ ID NO: 1840 - protein, 17 aa, Homo sapiens
KHHKKKKKKHKKKHKKH

SEQ ID NO: 1841 - protein, 18 aa, Homo sapiens
KHHKKKKKKHKKKHKKHH

SEQ ID NO: 1842 - protein, 11 aa, Homo sapiens
HHKKKKKKHKK

SEQ ID NO: 1843 - protein, 10 aa, Homo sapiens
HHKKKKKKHK

SEQ ID NO: 1844 - protein, 12 aa, Homo sapiens
HHKKKKKKHKKK

SEQ ID NO: 1845 - protein, 14 aa, Homo sapiens
HHKKKKKKHKKKHK

SEQ ID NO: 1846 - protein, 15 aa, Homo sapiens
HHKKKKKKHKKKHKK

SEQ ID NO: 1847 - protein, 10 aa, Homo sapiens
HKKKKKKHKK

SEQ ID NO: 1848 - protein, 9 aa, Homo sapiens
HKKKKKKHK

SEQ ID NO: 1849 - protein, 11 aa, Homo sapiens
HKKKKKKHKKK

SEQ ID NO: 1850 - protein, 13 aa, Homo sapiens
HKKKKKKHKKKHK

SEQ ID NO: 1851 - protein, 14 aa, Homo sapiens
HKKKKKKHKKKHKK

SEQ ID NO: 1852 - protein, 9 aa, Homo sapiens
KKKKKKHKK

SEQ ID NO: 1853 - protein, 8 aa, Homo sapiens
KKKKKKHK

SEQ ID NO: 1854 - protein, 10 aa, Homo sapiens
KKKKKKHKKK

SEQ ID NO: 1855 - protein, 11 aa, Homo sapiens
KKKKKKHKKKH

SEQ ID NO: 1856 - protein, 14 aa, Homo sapiens
KKKKKKHKKKHKKH

SEQ ID NO: 1857 - protein, 15 aa, Homo sapiens
KKKKKKHKKKHKKHH

SEQ ID NO: 1858 - protein, 8 aa, Homo sapiens
KKKKKHKK

SEQ ID NO: 1859 - protein, 7 aa, Homo sapiens
KKKKKHK

SEQ ID NO: 1860 - protein, 9 aa, Homo sapiens
KKKKKHKKK

SEQ ID NO: 1861 - protein, 10 aa, Homo sapiens
KKKKKHKKKH

SEQ ID NO: 1862 - protein, 11 aa, Homo sapiens
KKKKKHKKKHK

SEQ ID NO: 1863 - protein, 13 aa, Homo sapiens
KKKKKHKKKHKKH

SEQ ID NO: 1864 - protein, 14 aa, Homo sapiens
KKKKKHKKKHKKHH

SEQ ID NO: 1865 - protein, 7 aa, Homo sapiens
KKKKHKK

SEQ ID NO: 1866 - protein, 8 aa, Homo sapiens
KKKKHKKK

SEQ ID NO: 1867 - protein, 9 aa, Homo sapiens
KKKKHKKKH

SEQ ID NO: 1868 - protein, 10 aa, Homo sapiens
KKKKHKKKHK

SEQ ID NO: 1869 - protein, 11 aa, Homo sapiens
KKKKHKKKHKK

SEQ ID NO: 1870 - protein, 12 aa, Homo sapiens
KKKKHKKKHKKH

SEQ ID NO: 1871 - protein, 13 aa, Homo sapiens
KKKKHKKKHKKHH

SEQ ID NO: 1872 - protein, 7 aa, Homo sapiens
KKKHKKK

SEQ ID NO: 1873 - protein, 8 aa, Homo sapiens
KKKHKKKH

SEQ ID NO: 1874 - protein, 9 aa, Homo sapiens
KKKHKKKHK

SEQ ID NO: 1875 - protein, 10 aa, Homo sapiens
KKKHKKKHKK

SEQ ID NO: 1876 - protein, 11 aa, Homo sapiens
KKKHKKKHKKH

SEQ ID NO: 1877 - protein, 12 aa, Homo sapiens
KKKHKKKHKKHH

SEQ ID NO: 1878 - protein, 8 aa, Homo sapiens
KKHKKKHK

SEQ ID NO: 1879 - protein, 9 aa, Homo sapiens
KKHKKKHKK

SEQ ID NO: 1880 - protein, 10 aa, Homo sapiens
KKHKKKHKKH

SEQ ID NO: 1881 - protein, 11 aa, Homo sapiens
KKHKKKHKKHH

SEQ ID NO: 1882 - protein, 7 aa, Homo sapiens
KHKKKHK

SEQ ID NO: 1883 - protein, 8 aa, Homo sapiens
KHKKKHKK

SEQ ID NO: 1884 - protein, 9 aa, Homo sapiens
KHKKKHKKH

SEQ ID NO: 1885 - protein, 10 aa, Homo sapiens
KHKKKHKKHH

SEQ ID NO: 1886 - protein, 7 aa, Homo sapiens
KHHKKKK

SEQ ID NO: 1887 - protein, 8 aa, Homo sapiens
KHHKKKKK

SEQ ID NO: 1888 - protein, 9 aa, Homo sapiens
KHHKKKKKK

SEQ ID NO: 1889 - protein, 10 aa, Homo sapiens
KHHKKKKKKH

SEQ ID NO: 1890 - protein, 11 aa, Homo sapiens
KHHKKKKKKHK

SEQ ID NO: 1891 - protein, 14 aa, Homo sapiens
KHHKKKKKKHKKKH

SEQ ID NO: 1892 - protein, 17 aa, Homo sapiens
KHHKKKKKKHKKKHKKH

SEQ ID NO: 1893 - protein, 18 aa, Homo sapiens
KHHKKKKKKHKKKHKKHH

SEQ ID NO: 1894 - protein, 11 aa, Homo sapiens
HHKKKKKKHKK

SEQ ID NO: 1895 - protein, 10 aa, Homo sapiens
HHKKKKKKHK

SEQ ID NO: 1896 - protein, 12 aa, Homo sapiens
HHKKKKKKHKKK

SEQ ID NO: 1897 - protein, 14 aa, Homo sapiens
HHKKKKKKHKKKHK

SEQ ID NO: 1898 - protein, 15 aa, Homo sapiens
HHKKKKKKHKKKHKK

SEQ ID NO: 1899 - protein, 10 aa, Homo sapiens
HKKKKKKHKK

SEQ ID NO: 1900 - protein, 9 aa, Homo sapiens
HKKKKKKHK

SEQ ID NO: 1901 - protein, 11 aa, Homo sapiens
HKKKKKKHKKK

SEQ ID NO: 1902 - protein, 13 aa, Homo sapiens
HKKKKKKHKKKHK

SEQ ID NO: 1903 - protein, 14 aa, Homo sapiens
HKKKKKKHKKKHKK

SEQ ID NO: 1904 - protein, 9 aa, Homo sapiens
KKKKKKHKK

SEQ ID NO: 1905 - protein, 8 aa, Homo sapiens
KKKKKKHK

SEQ ID NO: 1906 - protein, 10 aa, Homo sapiens
KKKKKKHKKK

SEQ ID NO: 1907 - protein, 11 aa, Homo sapiens
KKKKKKHKKKH

SEQ ID NO: 1908 - protein, 14 aa, Homo sapiens
KKKKKKHKKKHKKH

SEQ ID NO: 1909 - protein, 15 aa, Homo sapiens
KKKKKKHKKKHKKHH

SEQ ID NO: 1910 - protein, 8 aa, Homo sapiens
KKKKKHKK

SEQ ID NO: 1911 - protein, 7 aa, Homo sapiens
KKKKKHK

SEQ ID NO: 1912 - protein, 9 aa, Homo sapiens
KKKKKHKKK

SEQ ID NO: 1913 - protein, 10 aa, Homo sapiens
KKKKKHKKKH

SEQ ID NO: 1914 - protein, 11 aa, Homo sapiens
KKKKKHKKKHK

SEQ ID NO: 1915 - protein, 13 aa, Homo sapiens
KKKKKHKKKHKKH

SEQ ID NO: 1916 - protein, 14 aa, Homo sapiens
KKKKKHKKKHKKHH

SEQ ID NO: 1917 - protein, 7 aa, Homo sapiens
KKKKHKK

SEQ ID NO: 1918 - protein, 8 aa, Homo sapiens
KKKKHKKK

SEQ ID NO: 1919 - protein, 9 aa, Homo sapiens
KKKKHKKKH

SEQ ID NO: 1920 - protein, 10 aa, Homo sapiens
KKKKHKKKHK

SEQ ID NO: 1921 - protein, 11 aa, Homo sapiens
KKKKHKKKHKK

SEQ ID NO: 1922 - protein, 12 aa, Homo sapiens
KKKKHKKKHKKH

SEQ ID NO: 1923 - protein, 13 aa, Homo sapiens
KKKKHKKKHKKHH

SEQ ID NO: 1924 - protein, 7 aa, Homo sapiens
KKKHKKK

SEQ ID NO: 1925 - protein, 8 aa, Homo sapiens
KKKHKKKH

SEQ ID NO: 1926 - protein, 9 aa, Homo sapiens
KKKHKKKHK

SEQ ID NO: 1927 - protein, 10 aa, Homo sapiens
KKKHKKKHKK

SEQ ID NO: 1928 - protein, 11 aa, Homo sapiens
KKKHKKKHKKH

SEQ ID NO: 1929 - protein, 12 aa, Homo sapiens
KKKHKKKHKKHH

SEQ ID NO: 1930 - protein, 8 aa, Homo sapiens
KKHKKKHK

SEQ ID NO: 1931 - protein, 9 aa, Homo sapiens
KKHKKKHKK

SEQ ID NO: 1932 - protein, 10 aa, Homo sapiens
KKHKKKHKKH

SEQ ID NO: 1933 - protein, 11 aa, Homo sapiens
KKHKKKHKKHH

SEQ ID NO: 1934 - protein, 7 aa, Homo sapiens
KHKKKHK

SEQ ID NO: 1935 - protein, 8 aa, Homo sapiens
KHKKKHKK

SEQ ID NO: 1936 - protein, 9 aa, Homo sapiens
KHKKKHKKH

SEQ ID NO: 1937 - protein, 10 aa, Homo sapiens
KHKKKHKKHH

SEQ ID NO: 1938 - protein, 179 aa, Tobacco mosaic virus
MASKTYDGKIILYKSRGRSRQTKMQIFVKTLTGKTITLEVESSDTIDNVKAKIQDKEGIPPDQQRLIFAGKQLEDGRTLADYNIQKESTLHLVLRLRGGAKKRKKKTYTKPKKIKHKHKKVKLAVLQFYKVDDSGKVQRLRKECPNAECGAGTFMANHFDRHYCGKCGLTYVYNKAGGD

SEQ ID NO: 1939 - protein, 85 aa, Tobacco mosaic virus
HLVLRLRGGAKKRKKKTYTKPKKIKHKHKKVKLAVLQFYKVDDSGKVQRLRKECPNAECGAGTFMANHFDRHYCGKCGLTYVYNK

SEQ ID NO: 1940 - protein, 42 aa, Tobacco mosaic virus
KAKIQDKEGIPPDQQRLIFAGKQLEDGRTLADYNIQKESTLH

SEQ ID NO: 1941 - protein, 20 aa, Tobacco mosaic virus
HLVLRLRGGAKKRKKKTYTK

SEQ ID NO: 1942 - protein, 22 aa, Tobacco mosaic virus
HLVLRLRGGAKKRKKKTYTKPK

SEQ ID NO: 1943 - protein, 23 aa, Tobacco mosaic virus
HLVLRLRGGAKKRKKKTYTKPKK

SEQ ID NO: 1944 - protein, 25 aa, Tobacco mosaic virus
HLVLRLRGGAKKRKKKTYTKPKKIK

SEQ ID NO: 1945 - protein, 27 aa, Tobacco mosaic virus
HLVLRLRGGAKKRKKKTYTKPKKIKHK

SEQ ID NO: 1946 - protein, 29 aa, Tobacco mosaic virus
HLVLRLRGGAKKRKKKTYTKPKKIKHKHK

SEQ ID NO: 1947 - protein, 30 aa, Tobacco mosaic virus
HLVLRLRGGAKKRKKKTYTKPKKIKHKHKK

SEQ ID NO: 1948 - protein, 32 aa, Tobacco mosaic virus
HLVLRLRGGAKKRKKKTYTKPKKIKHKHKKVK

SEQ ID NO: 1949 - protein, 40 aa, Tobacco mosaic virus
HLVLRLRGGAKKRKKKTYTKPKKIKHKHKKVKLAVLQFYK

SEQ ID NO: 1950 - protein, 46 aa, Tobacco mosaic virus
HLVLRLRGGAKKRKKKTYTKPKKIKHKHKKVKLAVLQFYKVDDSGK

SEQ ID NO: 1951 - protein, 16 aa, Tobacco mosaic virus
KKRKKKTYTKPKKIKH

SEQ ID NO: 1952 - protein, 18 aa, Tobacco mosaic virus
KKRKKKTYTKPKKIKHKH

SEQ ID NO: 1953 - protein, 15 aa, Tobacco mosaic virus
KRKKKTYTKPKKIKH

SEQ ID NO: 1954 - protein, 17 aa, Tobacco mosaic virus
KRKKKTYTKPKKIKHKH

SEQ ID NO: 1955 - protein, 13 aa, Tobacco mosaic virus
KKKTYTKPKKIKH

SEQ ID NO: 1956 - protein, 15 aa, Tobacco mosaic virus
KKKTYTKPKKIKHKH

SEQ ID NO: 1957 - protein, 12 aa, Tobacco mosaic virus
KKTYTKPKKIKH

SEQ ID NO: 1958 - protein, 14 aa, Tobacco mosaic virus
KKTYTKPKKIKHKH

SEQ ID NO: 1959 - protein, 11 aa, Tobacco mosaic virus
KTYTKPKKIKH

SEQ ID NO: 1960 - protein, 13 aa, Tobacco mosaic virus
KTYTKPKKIKHKH

SEQ ID NO: 1961 - protein, 49 aa, Tobacco mosaic virus
KPKKIKHKHKKVKLAVLQFYKVDDSGKVQRLRKECPNAECGAGTFMANH

SEQ ID NO: 1962 - protein, 8 aa, Tobacco mosaic virus
KPKKIKHK

SEQ ID NO: 1963 - protein, 9 aa, Tobacco mosaic virus
KPKKIKHKH

SEQ ID NO: 1964 - protein, 10 aa, Tobacco mosaic virus
KPKKIKHKHK

SEQ ID NO: 1965 - protein, 11 aa, Tobacco mosaic virus
KPKKIKHKHKK

SEQ ID NO: 1966 - protein, 47 aa, Tobacco mosaic virus
KKIKHKHKKVKLAVLQFYKVDDSGKVQRLRKECPNAECGAGTFMANH

SEQ ID NO: 1967 - protein, 51 aa, Tobacco mosaic virus
KKIKHKHKKVKLAVLQFYKVDDSGKVQRLRKECPNAECGAGTFMANHFDRH

SEQ ID NO: 1968 - protein, 8 aa, Tobacco mosaic virus
KKIKHKHK

SEQ ID NO: 1969 - protein, 9 aa, Tobacco mosaic virus
KKIKHKHKK

SEQ ID NO: 1970 - protein, 11 aa, Tobacco mosaic virus
KKIKHKHKKVK

SEQ ID NO: 1971 - protein, 10 aa, Tobacco mosaic virus
KIKHKHKKVK

SEQ ID NO: 1972 - protein, 46 aa, Tobacco mosaic virus
KIKHKHKKVKLAVLQFYKVDDSGKVQRLRKECPNAECGAGTFMANH

SEQ ID NO: 1973 - protein, 50 aa, Tobacco mosaic virus
KIKHKHKKVKLAVLQFYKVDDSGKVQRLRKECPNAECGAGTFMANHFDRH

SEQ ID NO: 1974 - protein, 7 aa, Tobacco mosaic virus
KIKHKHK

SEQ ID NO: 1975 - protein, 8 aa, Tobacco mosaic virus
KIKHKHKK

SEQ ID NO: 1976 - protein, 8 aa, Tobacco mosaic virus
KHKHKKVK

SEQ ID NO: 1977 - protein, 44 aa, Tobacco mosaic virus
KHKHKKVKLAVLQFYKVDDSGKVQRLRKECPNAECGAGTFMANH

SEQ ID NO: 1978 - protein, 48 aa, Tobacco mosaic virus
KHKHKKVKLAVLQFYKVDDSGKVQRLRKECPNAECGAGTFMANHFDRH

SEQ ID NO: 1979 - protein, 15 aa, Tobacco mosaic virus
HKHKKVKLAVLQFYK

SEQ ID NO: 1980 - protein, 21 aa, Tobacco mosaic virus
HKHKKVKLAVLQFYKVDDSGK

SEQ ID NO: 1981 - protein, 27 aa, Tobacco mosaic virus
HKHKKVKLAVLQFYKVDDSGKVQRLRK

SEQ ID NO: 1982 - protein, 13 aa, Tobacco mosaic virus
HKKVKLAVLQFYK

SEQ ID NO: 1983 - protein, 19 aa, Tobacco mosaic virus
HKKVKLAVLQFYKVDDSGK

SEQ ID NO: 1984 - protein, 25 aa, Tobacco mosaic virus
HKKVKLAVLQFYKVDDSGKVQRLRK

SEQ ID NO: 1985 - protein, 39 aa, Tobacco mosaic virus
KVKLAVLQFYKVDDSGKVQRLRKECPNAECGAGTFMANH

SEQ ID NO: 1986 - protein, 43 aa, Tobacco mosaic virus
KVKLAVLQFYKVDDSGKVQRLRKECPNAECGAGTFMANHFDRH

SEQ ID NO: 1987 - protein, 37 aa, Tobacco mosaic virus
KLAVLQFYKVDDSGKVQRLRKECPNAECGAGTFMANH

SEQ ID NO: 1988 - protein, 41 aa, Tobacco mosaic virus
KLAVLQFYKVDDSGKVQRLRKECPNAECGAGTFMANHFDRH

SEQ ID NO: 1989 - protein, 29 aa, Tobacco mosaic virus
KVDDSGKVQRLRKECPNAECGAGTFMANH

SEQ ID NO: 1990 - protein, 33 aa, Tobacco mosaic virus
KVDDSGKVQRLRKECPNAECGAGTFMANHFDRH

SEQ ID NO: 1991 - protein, 23 aa, Tobacco mosaic virus
KVQRLRKECPNAECGAGTFMANH

SEQ ID NO: 1992 - protein, 27 aa, Tobacco mosaic virus
KVQRLRKECPNAECGAGTFMANHFDRH

SEQ ID NO: 1993 - protein, 18 aa, Tobacco mosaic virus
HFDRHYCGKCGLTYVYNK

SEQ ID NO: 1994 - protein, 14 aa, Tobacco mosaic virus
HYCGKCGLTYVYNK

SEQ ID NO: 1995 - protein, 565 aa, Human influenza A virus
MKVKLLVLLCTFTATYADTICIGYHANNSTDTVDTVLEKNVTVTHSVNLLEDSHNGKLCLLKGIAPLQLGNCSVAGWILGNPECELLISKESWSYIVEKPNPENGTCYPGHFADYEELREQLSSVSSFERFEIFPKESSWPNHTVTGVSASCSHNGESSFYKNLLWLTGKNGLYPNLSKSYANNKEKEVLVLWGVHHPPNIGDQKALYHTENAYVSVVSSHYSRKFTPEIAKRPKVRDQEGRINYYWTLLEPGDTIIFEANGNLIAPRYAFALSRGFGSGIINSNAPMDKCDAKCQTPQGAINSSLPFQNVHPVTIGECPKYVRSAKLRMVTGLRNIPSIQSRGLFGAIAGFIEGGWTGMVDGWYGYHHQNEQGSGYAADQKSTQNAINGITNKVNSVIEKMNTQFTAVGKEFNKLERRMENLNKKVDDGFIDIWTYNAELLVLLENERTLDFHDSNVKNLYEKVKSQLKNNAKEIGNGCFEFYHKCNDECMESVKNGTYDYPKYSEESKLNREKIDGVKLESMGVYQILAIYSTVASSLVLLVSLGAISFWMCSNGSLQCRICI

SEQ ID NO: 1996 - protein, 93 aa, Human influenza A virus
HTVTGVSASCSHNGESSFYKNLLWLTGKNGLYPNLSKSYANNKEKEVLVLWGVHHPPNIGDQKALYHTENAYVSVVSSHYSRKFTPEIAKRPK

SEQ ID NO: 1997 - protein, 46 aa, Human influenza A virus
HNGKLCLLKGIAPLQLGNCSVAGWILGNPECELLISKESWSYIVEK

SEQ ID NO: 1998 - protein, 22 aa, Human influenza A virus
KESWSYIVEKPNPENGTCYPGH

SEQ ID NO: 1999 - protein, 43 aa, Human influenza A virus
HTVTGVSASCSHNGESSFYKNLLWLTGKNGLYPNLSKSYANNK

SEQ ID NO: 2000 - protein, 45 aa, Human influenza A virus
HTVTGVSASCSHNGESSFYKNLLWLTGKNGLYPNLSKSYANNKEK

SEQ ID NO: 2001 - protein, 28 aa, Human influenza A virus
HTVTGVSASCSHNGESSFYKNLLWLTGK

SEQ ID NO: 2002 - protein, 37 aa, Human influenza A virus
HTVTGVSASCSHNGESSFYKNLLWLTGKNGLYPNLSK

SEQ ID NO: 2003 - protein, 34 aa, Human influenza A virus
HNGESSFYKNLLWLTGKNGLYPNLSKSYANNKEK

SEQ ID NO: 2004 - protein, 17 aa, Human influenza A virus
HNGESSFYKNLLWLTGK

SEQ ID NO: 2005 - protein, 26 aa, Human influenza A virus
HNGESSFYKNLLWLTGKNGLYPNLSK

SEQ ID NO: 2006 - protein, 32 aa, Human influenza A virus
HNGESSFYKNLLWLTGKNGLYPNLSKSYANNK

SEQ ID NO: 2007 - protein, 36 aa, Human influenza A virus
KNLLWLTGKNGLYPNLSKSYANNKEKEVLVLWGVHH

SEQ ID NO: 2008 - protein, 48 aa, Human influenza A virus
KNLLWLTGKNGLYPNLSKSYANNKEKEVLVLWGVHHPPNIGDQKALYH

SEQ ID NO: 2009 - protein, 35 aa, Human influenza A virus
KNLLWLTGKNGLYPNLSKSYANNKEKEVLVLWGVH

SEQ ID NO: 2010 - protein, 27 aa, Human influenza A virus
KNGLYPNLSKSYANNKEKEVLVLWGVH

SEQ ID NO: 2011 - protein, 28 aa, Human influenza A virus
KNGLYPNLSKSYANNKEKEVLVLWGVHH

SEQ ID NO: 2012 - protein, 40 aa, Human influenza A virus
KNGLYPNLSKSYANNKEKEVLVLWGVHHPPNIGDQKALYH

SEQ ID NO: 2013 - protein, 19 aa, Human influenza A virus
KSYANNKEKEVLVLWGVHH

SEQ ID NO: 2014 - protein, 31 aa, Human influenza A virus
KSYANNKEKEVLVLWGVHHPPNIGDQKALYH

SEQ ID NO: 2015 - protein, 43 aa, Human influenza A virus
KSYANNKEKEVLVLWGVHHPPNIGDQKALYHTENAYVSVVSSH

SEQ ID NO: 2016 - protein, 18 aa, Human influenza A virus
KSYANNKEKEVLVLWGVH

SEQ ID NO: 2017 - protein, 37 aa, Human influenza A virus
HHPPNIGDQKALYHTENAYVSVVSSHYSRKFTPEIAK

SEQ ID NO: 2018 - protein, 40 aa, Human influenza A virus
HHPPNIGDQKALYHTENAYVSVVSSHYSRKFTPEIAKRPK

SEQ ID NO: 2019 - protein, 36 aa, Human influenza A virus
HPPNIGDQKALYHTENAYVSVVSSHYSRKFTPEIAK

SEQ ID NO: 2020 - protein, 39 aa, Human influenza A virus
HPPNIGDQKALYHTENAYVSVVSSHYSRKFTPEIAKRPK

SEQ ID NO: 2021 - protein, 24 aa, Human influenza A virus
HTENAYVSVVSSHYSRKFTPEIAK

SEQ ID NO: 2022 - protein, 27 aa, Human influenza A virus
HTENAYVSVVSSHYSRKFTPEIAKRPK

SEQ ID NO: 2023 - protein, 12 aa, Human influenza A virus
HYSRKFTPEIAK

SEQ ID NO: 2024 - protein, 15 aa, Human influenza A virus
HYSRKFTPEIAKRPK

SEQ ID NO: 2025 - protein, 16 aa, Human influenza A virus
HPVTIGECPKYVRSAK

SEQ ID NO: 2026 - protein, 34 aa, Human influenza A virus
HHQNEQGSGYAADQKSTQNAINGITNKVNSVIEK

SEQ ID NO: 2027 - protein, 44 aa, Human influenza A virus
HHQNEQGSGYAADQKSTQNAINGITNKVNSVIEKMNTQFTAVGK

SEQ ID NO: 2028 - protein, 33 aa, Human influenza A virus
HQNEQGSGYAADQKSTQNAINGITNKVNSVIEK

SEQ ID NO: 2029 - protein, 43 aa, Human influenza A virus
HQNEQGSGYAADQKSTQNAINGITNKVNSVIEKMNTQFTAVGK

SEQ ID NO: 2030 - protein, 40 aa, Human influenza A virus
KLERRMENLNKKVDDGFIDIWTYNAELLVLLENERTLDFH

SEQ ID NO: 2031 - protein, 13 aa, Human influenza A virus
HDSNVKNLYEKVK

SEQ ID NO: 2032 - protein, 17 aa, Human influenza A virus
HDSNVKNLYEKVKSQLK

SEQ ID NO: 2033 - protein, 21 aa, Human influenza A virus
HDSNVKNLYEKVKSQLKNNAK

SEQ ID NO: 2034 - protein, 51 aa, Human influenza A virus
HDSNVKNLYEKVKSQLKNNAKEIGNGCFEFYHKCNDECMESVKNGTYDYPK

SEQ ID NO: 2035 - protein, 43 aa, Human influenza A virus
HDSNVKNLYEKVKSQLKNNAKEIGNGCFEFYHKCNDECMESVK

SEQ ID NO: 2036 - protein, 27 aa, Human influenza A virus
KNLYEKVKSQLKNNAKEIGNGCFEFYH

SEQ ID NO: 2037 - protein, 22 aa, Human influenza A virus
KVKSQLKNNAKEIGNGCFEFYH

SEQ ID NO: 2038 - protein, 20 aa, Human influenza A virus
KSQLKNNAKEIGNGCFEFYH

SEQ ID NO: 2039 - protein, 36 aa, Human influenza A virus
HKCNDECMESVKNGTYDYPKYSEESKLNREKIDGVK

SEQ ID NO: 2040 - protein, 20 aa, Human influenza A virus
HKCNDECMESVKNGTYDYPK

SEQ ID NO: 2041 - protein, 12 aa, Human influenza A virus
HKCNDECMESVK

SEQ ID NO: 2042 - protein, 26 aa, Human influenza A virus
HKCNDECMESVKNGTYDYPKYSEESK

SEQ ID NO: 2043 - protein, 473 aa, Plasmodium falciparum
MKSFKNKNTLRRKKAFPVFTKILLVSFLVWVLKCSNNCNNGNGSGDSFDFRNKRTLAQKQHEHHHHHHHQHQHQHQAPHQAHHHHHHGEVNHQAPQVHQQVHGQDQAHHHHHHHHHQLQPQQLQGTVANPPSNEPVVKTQVFREARPGGGFKAYEEKYESKHYKLKENVVDGKKDCDEKYEAANYAFSEECPYTVNDYSQENGPNIFALRKRFPLGMNDEDEEGKEALAIKDKLPGGLDEYQNQLYGICNETCTTCGPAAIDYVPADAPNGYAYGGSAHDGSHGNLRGHGNKGSEGYGYEAPYNPGFNGAPGSNGMQNYVPPHGAGYSAPYGVPHGAAHGSRYSSFSSVNKYGKHGDEKHHSSKKHEGNDGEGEKKKKSKKHKDHDGEKKKSKKHKDNEDAESVKSKKHKSHDCEKKKSKKHKDNEDAESVKSKKSVKEKGEKHNGKKPCSKKTNEENKNKEKTNNLKSDGSK

SEQ ID NO: 2044 - protein, 49 aa, Plasmodium falciparum
KKAFPVFTKILLVSFLVWVLKCSNNCNNGNGSGDSFDFRNKRTLAQKQH

SEQ ID NO: 2045 - protein, 51 aa, Plasmodium falciparum
KKAFPVFTKILLVSFLVWVLKCSNNCNNGNGSGDSFDFRNKRTLAQKQHEH

SEQ ID NO: 2046 - protein, 48 aa, Plasmodium falciparum
KAFPVFTKILLVSFLVWVLKCSNNCNNGNGSGDSFDFRNKRTLAQKQH

SEQ ID NO: 2047 - protein, 50 aa, Plasmodium falciparum
KAFPVFTKILLVSFLVWVLKCSNNCNNGNGSGDSFDFRNKRTLAQKQHEH

SEQ ID NO: 2048 - protein, 51 aa, Plasmodium falciparum
KAFPVFTKILLVSFLVWVLKCSNNCNNGNGSGDSFDFRNKRTLAQKQHEHH

SEQ ID NO: 2049 - protein, 9 aa, Plasmodium falciparum
KRTLAQKQH

SEQ ID NO: 2050 - protein, 11 aa, Plasmodium falciparum
KRTLAQKQHEH

SEQ ID NO: 2051 - protein, 12 aa, Plasmodium falciparum
KRTLAQKQHEHH

SEQ ID NO: 2052 - protein, 13 aa, Plasmodium falciparum
KRTLAQKQHEHHH

SEQ ID NO: 2053 - protein, 14 aa, Plasmodium falciparum
KRTLAQKQHEHHHH

SEQ ID NO: 2054 - protein, 15 aa, Plasmodium falciparum
KRTLAQKQHEHHHHH

SEQ ID NO: 2055 - protein, 16 aa, Plasmodium falciparum
KRTLAQKQHEHHHHHH

SEQ ID NO: 2056 - protein, 17 aa, Plasmodium falciparum
KRTLAQKQHEHHHHHHH

SEQ ID NO: 2057 - protein, 19 aa, Plasmodium falciparum
KRTLAQKQHEHHHHHHHQH

SEQ ID NO: 2058 - protein, 21 aa, Plasmodium falciparum
KRTLAQKQHEHHHHHHHQHQH

SEQ ID NO: 2059 - protein, 23 aa, Plasmodium falciparum
KRTLAQKQHEHHHHHHHQHQHQH

SEQ ID NO: 2060 - protein, 27 aa, Plasmodium falciparum
KRTLAQKQHEHHHHHHHQHQHQHQAPH

SEQ ID NO: 2061 - protein, 30 aa, Plasmodium falciparum
KRTLAQKQHEHHHHHHHQHQHQHQAPHQAH

SEQ ID NO: 2062 - protein, 31 aa, Plasmodium falciparum
KRTLAQKQHEHHHHHHHQHQHQHQAPHQAHH

SEQ ID NO: 2063 - protein, 32 aa, Plasmodium falciparum
KRTLAQKQHEHHHHHHHQHQHQHQAPHQAHHH

SEQ ID NO: 2064 - protein, 33 aa, Plasmodium falciparum
KRTLAQKQHEHHHHHHHQHQHQHQAPHQAHHHH

SEQ ID NO: 2065 - protein, 51 aa, Plasmodium falciparum
HHHHHHQLQPQQLQGTVANPPSNEPVVKTQVFREARPGGGFKAYEEKYESK

SEQ ID NO: 2066 - protein, 50 aa, Plasmodium falciparum
HHHHHQLQPQQLQGTVANPPSNEPVVKTQVFREARPGGGFKAYEEKYESK

SEQ ID NO: 2067 - protein, 49 aa, Plasmodium falciparum
HHHHQLQPQQLQGTVANPPSNEPVVKTQVFREARPGGGFKAYEEKYESK

SEQ ID NO: 2068 - protein, 48 aa, Plasmodium falciparum
HHHQLQPQQLQGTVANPPSNEPVVKTQVFREARPGGGFKAYEEKYESK

SEQ ID NO: 2069 - protein, 51 aa, Plasmodium falciparum
HHHQLQPQQLQGTVANPPSNEPVVKTQVFREARPGGGFKAYEEKYESKHYK

SEQ ID NO: 2070 - protein, 47 aa, Plasmodium falciparum
HHQLQPQQLQGTVANPPSNEPVVKTQVFREARPGGGFKAYEEKYESK

SEQ ID NO: 2071 - protein, 50 aa, Plasmodium falciparum
HHQLQPQQLQGTVANPPSNEPVVKTQVFREARPGGGFKAYEEKYESKHYK

SEQ ID NO: 2072 - protein, 46 aa, Plasmodium falciparum
HQLQPQQLQGTVANPPSNEPVVKTQVFREARPGGGFKAYEEKYESK

SEQ ID NO: 2073 - protein, 49 aa, Plasmodium falciparum
HQLQPQQLQGTVANPPSNEPVVKTQVFREARPGGGFKAYEEKYESKHYK

SEQ ID NO: 2074 - protein, 51 aa, Plasmodium falciparum
HQLQPQQLQGTVANPPSNEPVVKTQVFREARPGGGFKAYEEKYESKHYKLK

SEQ ID NO: 2075 - protein, 11 aa, Plasmodium falciparum
KAYEEKYESKH

SEQ ID NO: 2076 - protein, 8 aa, Plasmodium falciparum
KYESKHYK

SEQ ID NO: 2077 - protein, 10 aa, Plasmodium falciparum
KYESKHYKLK

SEQ ID NO: 2078 - protein, 12 aa, Plasmodium falciparum
HYKLKENVVDGK

SEQ ID NO: 2079 - protein, 13 aa, Plasmodium falciparum
HYKLKENVVDGKK

SEQ ID NO: 2080 - protein, 18 aa, Plasmodium falciparum
HYKLKENVVDGKKDCDEK

SEQ ID NO: 2081 - protein, 37 aa, Plasmodium falciparum
HGAGYSAPYGVPHGAAHGSRYSSFSSVNKYGKHGDEK

SEQ ID NO: 2082 - protein, 42 aa, Plasmodium falciparum
HGAGYSAPYGVPHGAAHGSRYSSFSSVNKYGKHGDEKHHSSK

SEQ ID NO: 2083 - protein, 43 aa, Plasmodium falciparum
HGAGYSAPYGVPHGAAHGSRYSSFSSVNKYGKHGDEKHHSSKK

SEQ ID NO: 2084 - protein, 25 aa, Plasmodium falciparum
HGAAHGSRYSSFSSVNKYGKHGDEK

SEQ ID NO: 2085 - protein, 30 aa, Plasmodium falciparum
HGAAHGSRYSSFSSVNKYGKHGDEKHHSSK

SEQ ID NO: 2086 - protein, 31 aa, Plasmodium falciparum
HGAAHGSRYSSFSSVNKYGKHGDEKHHSSKK

SEQ ID NO: 2087 - protein, 41 aa, Plasmodium falciparum
HGAAHGSRYSSFSSVNKYGKHGDEKHHSSKKHEGNDGEGEK

SEQ ID NO: 2088 - protein, 47 aa, Plasmodium falciparum
HGAAHGSRYSSFSSVNKYGKHGDEKHHSSKKHEGNDGEGEKKKKSKK

SEQ ID NO: 2089 - protein, 49 aa, Plasmodium falciparum
HGAAHGSRYSSFSSVNKYGKHGDEKHHSSKKHEGNDGEGEKKKKSKKHK

SEQ ID NO: 2090 - protein, 21 aa, Plasmodium falciparum
HGSRYSSFSSVNKYGKHGDEK

SEQ ID NO: 2091 - protein, 26 aa, Plasmodium falciparum
HGSRYSSFSSVNKYGKHGDEKHHSSK

SEQ ID NO: 2092 - protein, 27 aa, Plasmodium falciparum
HGSRYSSFSSVNKYGKHGDEKHHSSKK

SEQ ID NO: 2093 - protein, 37 aa, Plasmodium falciparum
HGSRYSSFSSVNKYGKHGDEKHHSSKKHEGNDGEGEK

SEQ ID NO: 2094 - protein, 43 aa, Plasmodium falciparum
HGSRYSSFSSVNKYGKHGDEKHHSSKKHEGNDGEGEKKKKSKK

SEQ ID NO: 2095 - protein, 45 aa, Plasmodium falciparum
HGSRYSSFSSVNKYGKHGDEKHHSSKKHEGNDGEGEKKKKSKKHK

SEQ ID NO: 2096 - protein, 51 aa, Plasmodium falciparum
HGSRYSSFSSVNKYGKHGDEKHHSSKKHEGNDGEGEKKKKSKKHKDHDGEK

SEQ ID NO: 2097 - protein, 9 aa, Plasmodium falciparum
KYGKHGDEK

SEQ ID NO: 2098 - protein, 11 aa, Plasmodium falciparum
KYGKHGDEKHH

SEQ ID NO: 2099 - protein, 10 aa, Plasmodium falciparum
KYGKHGDEKH

SEQ ID NO: 2100 - protein, 16 aa, Plasmodium falciparum
KYGKHGDEKHHSSKKH

SEQ ID NO: 2101 - protein, 32 aa, Plasmodium falciparum
KYGKHGDEKHHSSKKHEGNDGEGEKKKKSKKH

SEQ ID NO: 2102 - protein, 35 aa, Plasmodium falciparum
KYGKHGDEKHHSSKKHEGNDGEGEKKKKSKKHKDH

SEQ ID NO: 2103 - protein, 45 aa, Plasmodium falciparum
KYGKHGDEKHHSSKKHEGNDGEGEKKKKSKKHKDHDGEKKKSKKH

SEQ ID NO: 2104 - protein, 11 aa, Plasmodium falciparum
KHGDEKHHSSK

SEQ ID NO: 2105 - protein, 13 aa, Plasmodium falciparum
KHGDEKHHSSKKH

SEQ ID NO: 2106 - protein, 29 aa, Plasmodium falciparum
KHGDEKHHSSKKHEGNDGEGEKKKKSKKH

SEQ ID NO: 2107 - protein, 32 aa, Plasmodium falciparum
KHGDEKHHSSKKHEGNDGEGEKKKKSKKHKDH

SEQ ID NO: 2108 - protein, 42 aa, Plasmodium falciparum
KHGDEKHHSSKKHEGNDGEGEKKKKSKKHKDHDGEKKKSKKH

SEQ ID NO: 2109 - protein, 11 aa, Plasmodium falciparum
HGDEKHHSSKK

SEQ ID NO: 2110 - protein, 21 aa, Plasmodium falciparum
HGDEKHHSSKKHEGNDGEGEK

SEQ ID NO: 2111 - protein, 27 aa, Plasmodium falciparum
HGDEKHHSSKKHEGNDGEGEKKKKSKK

SEQ ID NO: 2112 - protein, 29 aa, Plasmodium falciparum
HGDEKHHSSKKHEGNDGEGEKKKKSKKHK

SEQ ID NO: 2113 - protein, 35 aa, Plasmodium falciparum
HGDEKHHSSKKHEGNDGEGEKKKKSKKHKDHDGEK

SEQ ID NO: 2114 - protein, 36 aa, Plasmodium falciparum
HGDEKHHSSKKHEGNDGEGEKKKKSKKHKDHDGEKK

SEQ ID NO: 2115 - protein, 37 aa, Plasmodium falciparum
HGDEKHHSSKKHEGNDGEGEKKKKSKKHKDHDGEKKK

SEQ ID NO: 2116 - protein, 39 aa, Plasmodium falciparum
HGDEKHHSSKKHEGNDGEGEKKKKSKKHKDHDGEKKKSK

SEQ ID NO: 2117 - protein, 51 aa, Plasmodium falciparum
HGDEKHHSSKKHEGNDGEGEKKKKSKKHKDHDGEKKKSKKHKDNEDAESVK

SEQ ID NO: 2118 - protein, 42 aa, Plasmodium falciparum
HGDEKHHSSKKHEGNDGEGEKKKKSKKHKDHDGEKKKSKKHK

SEQ ID NO: 2119 - protein, 7 aa, Plasmodium falciparum
KHHSSKK

SEQ ID NO: 2120 - protein, 8 aa, Plasmodium falciparum
KHHSSKKH

SEQ ID NO: 2121 - protein, 24 aa, Plasmodium falciparum
KHHSSKKHEGNDGEGEKKKKSKKH

SEQ ID NO: 2122 - protein, 27 aa, Plasmodium falciparum
KHHSSKKHEGNDGEGEKKKKSKKHKDH

SEQ ID NO: 2123 - protein, 37 aa, Plasmodium falciparum
KHHSSKKHEGNDGEGEKKKKSKKHKDHDGEKKKSKKH

SEQ ID NO: 2124 - protein, 51 aa, Plasmodium falciparum
KHHSSKKHEGNDGEGEKKKKSKKHKDHDGEKKKSKKHKDNEDAESVKSKKH

SEQ ID NO: 2125 - protein, 16 aa, Plasmodium falciparum
HHSSKKHEGNDGEGEK

SEQ ID NO: 2126 - protein, 22 aa, Plasmodium falciparum
HHSSKKHEGNDGEGEKKKKSKK

SEQ ID NO: 2127 - protein, 24 aa, Plasmodium falciparum
HHSSKKHEGNDGEGEKKKKSKKHK

SEQ ID NO: 2128 - protein, 30 aa, Plasmodium falciparum
HHSSKKHEGNDGEGEKKKKSKKHKDHDGEK

SEQ ID NO: 2129 - protein, 31 aa, Plasmodium falciparum
HHSSKKHEGNDGEGEKKKKSKKHKDHDGEKK

SEQ ID NO: 2130 - protein, 32 aa, Plasmodium falciparum
HHSSKKHEGNDGEGEKKKKSKKHKDHDGEKKK

SEQ ID NO: 2131 - protein, 34 aa, Plasmodium falciparum
HHSSKKHEGNDGEGEKKKKSKKHKDHDGEKKKSK

SEQ ID NO: 2132 - protein, 46 aa, Plasmodium falciparum
HHSSKKHEGNDGEGEKKKKSKKHKDHDGEKKKSKKHKDNEDAESVK

SEQ ID NO: 2133 - protein, 37 aa, Plasmodium falciparum
HHSSKKHEGNDGEGEKKKKSKKHKDHDGEKKKSKKHK

SEQ ID NO: 2134 - protein, 15 aa, Plasmodium falciparum
HSSKKHEGNDGEGEK

SEQ ID NO: 2135 - protein, 21 aa, Plasmodium falciparum
HSSKKHEGNDGEGEKKKKSKK

SEQ ID NO: 2136 - protein, 23 aa, Plasmodium falciparum
HSSKKHEGNDGEGEKKKKSKKHK

SEQ ID NO: 2137 - protein, 29 aa, Plasmodium falciparum
HSSKKHEGNDGEGEKKKKSKKHKDHDGEK

SEQ ID NO: 2138 - protein, 30 aa, Plasmodium falciparum
HSSKKHEGNDGEGEKKKKSKKHKDHDGEKK

SEQ ID NO: 2139 - protein, 31 aa, Plasmodium falciparum
HSSKKHEGNDGEGEKKKKSKKHKDHDGEKKK

SEQ ID NO: 2140 - protein, 33 aa, Plasmodium falciparum
HSSKKHEGNDGEGEKKKKSKKHKDHDGEKKKSK

SEQ ID NO: 2141 - protein, 45 aa, Plasmodium falciparum
HSSKKHEGNDGEGEKKKKSKKHKDHDGEKKKSKKHKDNEDAESVK

SEQ ID NO: 2142 - protein, 36 aa, Plasmodium falciparum
HSSKKHEGNDGEGEKKKKSKKHKDHDGEKKKSKKHK

SEQ ID NO: 2143 - protein, 11 aa, Plasmodium falciparum
KHEGNDGEGEK

SEQ ID NO: 2144 - protein, 18 aa, Plasmodium falciparum
KHEGNDGEGEKKKKSKKH

SEQ ID NO: 2145 - protein, 21 aa, Plasmodium falciparum
KHEGNDGEGEKKKKSKKHKDH

SEQ ID NO: 2146 - protein, 31 aa, Plasmodium falciparum
KHEGNDGEGEKKKKSKKHKDHDGEKKKSKKH

SEQ ID NO: 2147 - protein, 45 aa, Plasmodium falciparum
KHEGNDGEGEKKKKSKKHKDHDGEKKKSKKHKDNEDAESVKSKKH

SEQ ID NO: 2148 - protein, 48 aa, Plasmodium falciparum
KHEGNDGEGEKKKKSKKHKDHDGEKKKSKKHKDNEDAESVKSKKHKSH

SEQ ID NO: 2149 - protein, 16 aa, Plasmodium falciparum
HEGNDGEGEKKKKSKK

SEQ ID NO: 2150 - protein, 18 aa, Plasmodium falciparum
HEGNDGEGEKKKKSKKHK

SEQ ID NO: 2151 - protein, 24 aa, Plasmodium falciparum
HEGNDGEGEKKKKSKKHKDHDGEK

SEQ ID NO: 2152 - protein, 25 aa, Plasmodium falciparum
HEGNDGEGEKKKKSKKHKDHDGEKK

SEQ ID NO: 2153 - protein, 26 aa, Plasmodium falciparum
HEGNDGEGEKKKKSKKHKDHDGEKKK

SEQ ID NO: 2154 - protein, 28 aa, Plasmodium falciparum
HEGNDGEGEKKKKSKKHKDHDGEKKKSK

SEQ ID NO: 2155 - protein, 40 aa, Plasmodium falciparum
HEGNDGEGEKKKKSKKHKDHDGEKKKSKKHKDNEDAESVK

SEQ ID NO: 2156 - protein, 31 aa, Plasmodium falciparum
HEGNDGEGEKKKKSKKHKDHDGEKKKSKKHK

SEQ ID NO: 2157 - protein, 51 aa, Plasmodium falciparum
HEGNDGEGEKKKKSKKHKDHDGEKKKSKKHKDNEDAESVKSKKHKSHDCEK

SEQ ID NO: 2158 - protein, 8 aa, Plasmodium falciparum
KKKKSKKH

SEQ ID NO: 2159 - protein, 9 aa, Plasmodium falciparum
KKKKSKKHK

SEQ ID NO: 2160 - protein, 11 aa, Plasmodium falciparum
KKKKSKKHKDH

SEQ ID NO: 2161 - protein, 21 aa, Plasmodium falciparum
KKKKSKKHKDHDGEKKKSKKH

SEQ ID NO: 2162 - protein, 35 aa, Plasmodium falciparum
KKKKSKKHKDHDGEKKKSKKHKDNEDAESVKSKKH

SEQ ID NO: 2163 - protein, 38 aa, Plasmodium falciparum
KKKKSKKHKDHDGEKKKSKKHKDNEDAESVKSKKHKSH

SEQ ID NO: 2164 - protein, 48 aa, Plasmodium falciparum
KKKKSKKHKDHDGEKKKSKKHKDNEDAESVKSKKHKSHDCEKKKSKKH

SEQ ID NO: 2165 - protein, 8 aa, Plasmodium falciparum
KKKSKKHK

SEQ ID NO: 2166 - protein, 10 aa, Plasmodium falciparum
KKKSKKHKDH

SEQ ID NO: 2167 - protein, 20 aa, Plasmodium falciparum
KKKSKKHKDHDGEKKKSKKH

SEQ ID NO: 2168 - protein, 34 aa, Plasmodium falciparum
KKKSKKHKDHDGEKKKSKKHKDNEDAESVKSKKH

SEQ ID NO: 2169 - protein, 37 aa, Plasmodium falciparum
KKKSKKHKDHDGEKKKSKKHKDNEDAESVKSKKHKSH

SEQ ID NO: 2170 - protein, 47 aa, Plasmodium falciparum
KKKSKKHKDHDGEKKKSKKHKDNEDAESVKSKKHKSHDCEKKKSKKH

SEQ ID NO: 2171 - protein, 7 aa, Plasmodium falciparum
KKSKKHK

SEQ ID NO: 2172 - protein, 9 aa, Plasmodium falciparum
KKSKKHKDH

SEQ ID NO: 2173 - protein, 19 aa, Plasmodium falciparum
KKSKKHKDHDGEKKKSKKH

SEQ ID NO: 2174 - protein, 33 aa, Plasmodium falciparum
KKSKKHKDHDGEKKKSKKHKDNEDAESVKSKKH

SEQ ID NO: 2175 - protein, 36 aa, Plasmodium falciparum
KKSKKHKDHDGEKKKSKKHKDNEDAESVKSKKHKSH

SEQ ID NO: 2176 - protein, 46 aa, Plasmodium falciparum
KKSKKHKDHDGEKKKSKKHKDNEDAESVKSKKHKSHDCEKKKSKKH

SEQ ID NO: 2177 - protein, 10 aa, Plasmodium falciparum
KKHKDHDGEK

SEQ ID NO: 2178 - protein, 11 aa, Plasmodium falciparum
KKHKDHDGEKK

SEQ ID NO: 2179 - protein, 16 aa, Plasmodium falciparum
KKHKDHDGEKKKSKKH

SEQ ID NO: 2180 - protein, 30 aa, Plasmodium falciparum
KKHKDHDGEKKKSKKHKDNEDAESVKSKKH

SEQ ID NO: 2181 - protein, 33 aa, Plasmodium falciparum
KKHKDHDGEKKKSKKHKDNEDAESVKSKKHKSH

SEQ ID NO: 2182 - protein, 43 aa, Plasmodium falciparum
KKHKDHDGEKKKSKKHKDNEDAESVKSKKHKSHDCEKKKSKKH

SEQ ID NO: 2183 - protein, 9 aa, Plasmodium falciparum
KHKDHDGEK

SEQ ID NO: 2184 - protein, 10 aa, Plasmodium falciparum
KHKDHDGEKK

SEQ ID NO: 2185 - protein, 11 aa, Plasmodium falciparum
KHKDHDGEKKK

SEQ ID NO: 2186 - protein, 15 aa, Plasmodium falciparum
KHKDHDGEKKKSKKH

SEQ ID NO: 2187 - protein, 29 aa, Plasmodium falciparum
KHKDHDGEKKKSKKHKDNEDAESVKSKKH

SEQ ID NO: 2188 - protein, 32 aa, Plasmodium falciparum
KHKDHDGEKKKSKKHKDNEDAESVKSKKHKSH

SEQ ID NO: 2189 - protein, 42 aa, Plasmodium falciparum
KHKDHDGEKKKSKKHKDNEDAESVKSKKHKSHDCEKKKSKKH

SEQ ID NO: 2190 - protein, 8 aa, Plasmodium falciparum
HKDHDGEK

SEQ ID NO: 2191 - protein, 9 aa, Plasmodium falciparum
HKDHDGEKK

SEQ ID NO: 2192 - protein, 10 aa, Plasmodium falciparum
HKDHDGEKKK

SEQ ID NO: 2193 - protein, 12 aa, Plasmodium falciparum
HKDHDGEKKKSK

SEQ ID NO: 2194 - protein, 24 aa, Plasmodium falciparum
HKDHDGEKKKSKKHKDNEDAESVK

SEQ ID NO: 2195 - protein, 15 aa, Plasmodium falciparum
HKDHDGEKKKSKKHK

SEQ ID NO: 2196 - protein, 35 aa, Plasmodium falciparum
HKDHDGEKKKSKKHKDNEDAESVKSKKHKSHDCEK

SEQ ID NO: 2197 - protein, 36 aa, Plasmodium falciparum
HKDHDGEKKKSKKHKDNEDAESVKSKKHKSHDCEKK

SEQ ID NO: 2198 - protein, 37 aa, Plasmodium falciparum
HKDHDGEKKKSKKHKDNEDAESVKSKKHKSHDCEKKK

SEQ ID NO: 2199 - protein, 39 aa, Plasmodium falciparum
HKDHDGEKKKSKKHKDNEDAESVKSKKHKSHDCEKKKSK

SEQ ID NO: 2200 - protein, 42 aa, Plasmodium falciparum
HKDHDGEKKKSKKHKDNEDAESVKSKKHKSHDCEKKKSKKHK

SEQ ID NO: 2201 - protein, 51 aa, Plasmodium falciparum
HKDHDGEKKKSKKHKDNEDAESVKSKKHKSHDCEKKKSKKHKDNEDAESVK

SEQ ID NO: 2202 - protein, 7 aa, Plasmodium falciparum
KDHDGEK

SEQ ID NO: 2203 - protein, 8 aa, Plasmodium falciparum
KDHDGEKK

SEQ ID NO: 2204 - protein, 9 aa, Plasmodium falciparum
KDHDGEKKK

SEQ ID NO: 2205 - protein, 11 aa, Plasmodium falciparum
KDHDGEKKKSK

SEQ ID NO: 2206 - protein, 13 aa, Plasmodium falciparum
KDHDGEKKKSKKH

SEQ ID NO: 2207 - protein, 27 aa, Plasmodium falciparum
KDHDGEKKKSKKHKDNEDAESVKSKKH

SEQ ID NO: 2208 - protein, 30 aa, Plasmodium falciparum
KDHDGEKKKSKKHKDNEDAESVKSKKHKSH

SEQ ID NO: 2209 - protein, 40 aa, Plasmodium falciparum
KDHDGEKKKSKKHKDNEDAESVKSKKHKSHDCEKKKSKKH

SEQ ID NO: 2210 - protein, 21 aa, Plasmodium falciparum
HDGEKKKSKKHKDNEDAESVK

SEQ ID NO: 2211 - protein, 12 aa, Plasmodium falciparum
HDGEKKKSKKHK

SEQ ID NO: 2212 - protein, 32 aa, Plasmodium falciparum
HDGEKKKSKKHKDNEDAESVKSKKHKSHDCEK

SEQ ID NO: 2213 - protein, 33 aa, Plasmodium falciparum
HDGEKKKSKKHKDNEDAESVKSKKHKSHDCEKK

SEQ ID NO: 2214 - protein, 34 aa, Plasmodium falciparum
HDGEKKKSKKHKDNEDAESVKSKKHKSHDCEKKK

SEQ ID NO: 2215 - protein, 36 aa, Plasmodium falciparum
HDGEKKKSKKHKDNEDAESVKSKKHKSHDCEKKKSK

SEQ ID NO: 2216 - protein, 39 aa, Plasmodium falciparum
HDGEKKKSKKHKDNEDAESVKSKKHKSHDCEKKKSKKHK

SEQ ID NO: 2217 - protein, 48 aa, Plasmodium falciparum
HDGEKKKSKKHKDNEDAESVKSKKHKSHDCEKKKSKKHKDNEDAESVK

SEQ ID NO: 2218 - protein, 8 aa, Plasmodium falciparum
KKKSKKHK

SEQ ID NO: 2219 - protein, 21 aa, Plasmodium falciparum
KKKSKKHKDNEDAESVKSKKH

SEQ ID NO: 2220 - protein, 24 aa, Plasmodium falciparum
KKKSKKHKDNEDAESVKSKKHKSH

SEQ ID NO: 2221 - protein, 34 aa, Plasmodium falciparum
KKKSKKHKDNEDAESVKSKKHKSHDCEKKKSKKH

SEQ ID NO: 2222 - protein, 7 aa, Plasmodium falciparum
KKSKKHK

SEQ ID NO: 2223 - protein, 20 aa, Plasmodium falciparum
KKSKKHKDNEDAESVKSKKH

SEQ ID NO: 2224 - protein, 23 aa, Plasmodium falciparum
KKSKKHKDNEDAESVKSKKHKSH

SEQ ID NO: 2225 - protein, 33 aa, Plasmodium falciparum
KKSKKHKDNEDAESVKSKKHKSHDCEKKKSKKH

SEQ ID NO: 2226 - protein, 11 aa, Plasmodium falciparum
HKDNEDAESVK

SEQ ID NO: 2227 - protein, 22 aa, Plasmodium falciparum
HKDNEDAESVKSKKHKSHDCEK

SEQ ID NO: 2228 - protein, 23 aa, Plasmodium falciparum
HKDNEDAESVKSKKHKSHDCEKK

SEQ ID NO: 2229 - protein, 24 aa, Plasmodium falciparum
HKDNEDAESVKSKKHKSHDCEKKK

SEQ ID NO: 2230 - protein, 26 aa, Plasmodium falciparum
HKDNEDAESVKSKKHKSHDCEKKKSK

SEQ ID NO: 2231 - protein, 29 aa, Plasmodium falciparum
HKDNEDAESVKSKKHKSHDCEKKKSKKHK

SEQ ID NO: 2232 - protein, 38 aa, Plasmodium falciparum
HKDNEDAESVKSKKHKSHDCEKKKSKKHKDNEDAESVK

SEQ ID NO: 2233 - protein, 44 aa, Plasmodium falciparum
HKDNEDAESVKSKKHKSHDCEKKKSKKHKDNEDAESVKSKKSVK

SEQ ID NO: 2234 - protein, 46 aa, Plasmodium falciparum
HKDNEDAESVKSKKHKSHDCEKKKSKKHKDNEDAESVKSKKSVKEK

SEQ ID NO: 2235 - protein, 49 aa, Plasmodium falciparum
HKDNEDAESVKSKKHKSHDCEKKKSKKHKDNEDAESVKSKKSVKEKGEK

SEQ ID NO: 2236 - protein, 14 aa, Plasmodium falciparum
KDNEDAESVKSKKH

SEQ ID NO: 2237 - protein, 17 aa, Plasmodium falciparum
KDNEDAESVKSKKHKSH

SEQ ID NO: 2238 - protein, 27 aa, Plasmodium falciparum
KDNEDAESVKSKKHKSHDCEKKKSKKH

SEQ ID NO: 2239 - protein, 49 aa, Plasmodium falciparum
KDNEDAESVKSKKHKSHDCEKKKSKKHKDNEDAESVKSKKSVKEKGEKH

SEQ ID NO: 2240 - protein, 10 aa, Plasmodium falciparum
KKHKSHDCEK

SEQ ID NO: 2241 - protein, 11 aa, Plasmodium falciparum
KKHKSHDCEKK

SEQ ID NO: 2242 - protein, 16 aa, Plasmodium falciparum
KKHKSHDCEKKKSKKH

SEQ ID NO: 2243 - protein, 38 aa, Plasmodium falciparum
KKHKSHDCEKKKSKKHKDNEDAESVKSKKSVKEKGEKH

SEQ ID NO: 2244 - protein, 9 aa, Plasmodium falciparum
KHKSHDCEK

SEQ ID NO: 2245 - protein, 10 aa, Plasmodium falciparum
KHKSHDCEKK

SEQ ID NO: 2246 - protein, 11 aa, Plasmodium falciparum
KHKSHDCEKKK

SEQ ID NO: 2247 - protein, 15 aa, Plasmodium falciparum
KHKSHDCEKKKSKKH

SEQ ID NO: 2248 - protein, 37 aa, Plasmodium falciparum
KHKSHDCEKKKSKKHKDNEDAESVKSKKSVKEKGEKH

SEQ ID NO: 2249 - protein, 8 aa, Plasmodium falciparum
HKSHDCEK

SEQ ID NO: 2250 - protein, 9 aa, Plasmodium falciparum
HKSHDCEKK

SEQ ID NO: 2251 - protein, 10 aa, Plasmodium falciparum
HKSHDCEKKK

SEQ ID NO: 2252 - protein, 12 aa, Plasmodium falciparum
HKSHDCEKKKSK

SEQ ID NO: 2253 - protein, 15 aa, Plasmodium falciparum
HKSHDCEKKKSKKHK

SEQ ID NO: 2254 - protein, 24 aa, Plasmodium falciparum
HKSHDCEKKKSKKHKDNEDAESVK

SEQ ID NO: 2255 - protein, 30 aa, Plasmodium falciparum
HKSHDCEKKKSKKHKDNEDAESVKSKKSVK

SEQ ID NO: 2256 - protein, 32 aa, Plasmodium falciparum
HKSHDCEKKKSKKHKDNEDAESVKSKKSVKEK

SEQ ID NO: 2257 - protein, 35 aa, Plasmodium falciparum
HKSHDCEKKKSKKHKDNEDAESVKSKKSVKEKGEK

SEQ ID NO: 2258 - protein, 39 aa, Plasmodium falciparum
HKSHDCEKKKSKKHKDNEDAESVKSKKSVKEKGEKHNGK

SEQ ID NO: 2259 - protein, 40 aa, Plasmodium falciparum
HKSHDCEKKKSKKHKDNEDAESVKSKKSVKEKGEKHNGKK

SEQ ID NO: 2260 - protein, 44 aa, Plasmodium falciparum
HKSHDCEKKKSKKHKDNEDAESVKSKKSVKEKGEKHNGKKPCSK

SEQ ID NO: 2261 - protein, 45 aa, Plasmodium falciparum
HKSHDCEKKKSKKHKDNEDAESVKSKKSVKEKGEKHNGKKPCSKK

SEQ ID NO: 2262 - protein, 51 aa, Plasmodium falciparum
HKSHDCEKKKSKKHKDNEDAESVKSKKSVKEKGEKHNGKKPCSKKTNEENK

SEQ ID NO: 2263 - protein, 8 aa, Plasmodium falciparum
KSHDCEKK

SEQ ID NO: 2264 - protein, 9 aa, Plasmodium falciparum
KSHDCEKKK

SEQ ID NO: 2265 - protein, 11 aa, Plasmodium falciparum
KSHDCEKKKSK

SEQ ID NO: 2266 - protein, 13 aa, Plasmodium falciparum
KSHDCEKKKSKKH

SEQ ID NO: 2267 - protein, 35 aa, Plasmodium falciparum
KSHDCEKKKSKKHKDNEDAESVKSKKSVKEKGEKH

SEQ ID NO: 2268 - protein, 7 aa, Plasmodium falciparum
KSHDCEK

SEQ ID NO: 2269 - protein, 12 aa, Plasmodium falciparum
HDCEKKKSKKHK

SEQ ID NO: 2270 - protein, 21 aa, Plasmodium falciparum
HDCEKKKSKKHKDNEDAESVK

SEQ ID NO: 2271 - protein, 27 aa, Plasmodium falciparum
HDCEKKKSKKHKDNEDAESVKSKKSVK

SEQ ID NO: 2272 - protein, 29 aa, Plasmodium falciparum
HDCEKKKSKKHKDNEDAESVKSKKSVKEK

SEQ ID NO: 2273 - protein, 32 aa, Plasmodium falciparum
HDCEKKKSKKHKDNEDAESVKSKKSVKEKGEK

SEQ ID NO: 2274 - protein, 36 aa, Plasmodium falciparum
HDCEKKKSKKHKDNEDAESVKSKKSVKEKGEKHNGK

SEQ ID NO: 2275 - protein, 37 aa, Plasmodium falciparum
HDCEKKKSKKHKDNEDAESVKSKKSVKEKGEKHNGKK

SEQ ID NO: 2276 - protein, 41 aa, Plasmodium falciparum
HDCEKKKSKKHKDNEDAESVKSKKSVKEKGEKHNGKKPCSK

SEQ ID NO: 2277 - protein, 42 aa, Plasmodium falciparum
HDCEKKKSKKHKDNEDAESVKSKKSVKEKGEKHNGKKPCSKK

SEQ ID NO: 2278 - protein, 48 aa, Plasmodium falciparum
HDCEKKKSKKHKDNEDAESVKSKKSVKEKGEKHNGKKPCSKKTNEENK

SEQ ID NO: 2279 - protein, 50 aa, Plasmodium falciparum
HDCEKKKSKKHKDNEDAESVKSKKSVKEKGEKHNGKKPCSKKTNEENKNK

SEQ ID NO: 2280 - protein, 8 aa, Plasmodium falciparum
KKKSKKHK

SEQ ID NO: 2281 - protein, 29 aa, Plasmodium falciparum
KKKSKKHKDNEDAESVKSKKSVKEKGEKH

SEQ ID NO: 2282 - protein, 7 aa, Plasmodium falciparum
KKSKKHK

SEQ ID NO: 2283 - protein, 28 aa, Plasmodium falciparum
KKSKKHKDNEDAESVKSKKSVKEKGEKH

SEQ ID NO: 2284 - protein, 11 aa, Plasmodium falciparum
HKDNEDAESVK

SEQ ID NO: 2285 - protein, 17 aa, Plasmodium falciparum
HKDNEDAESVKSKKSVK

SEQ ID NO: 2286 - protein, 19 aa, Plasmodium falciparum
HKDNEDAESVKSKKSVKEK

SEQ ID NO: 2287 - protein, 22 aa, Plasmodium falciparum
HKDNEDAESVKSKKSVKEKGEK

SEQ ID NO: 2288 - protein, 26 aa, Plasmodium falciparum
HKDNEDAESVKSKKSVKEKGEKHNGK

SEQ ID NO: 2289 - protein, 27 aa, Plasmodium falciparum
HKDNEDAESVKSKKSVKEKGEKHNGKK

SEQ ID NO: 2290 - protein, 31 aa, Plasmodium falciparum
HKDNEDAESVKSKKSVKEKGEKHNGKKPCSK

SEQ ID NO: 2291 - protein, 32 aa, Plasmodium falciparum
HKDNEDAESVKSKKSVKEKGEKHNGKKPCSKK

SEQ ID NO: 2292 - protein, 38 aa, Plasmodium falciparum
HKDNEDAESVKSKKSVKEKGEKHNGKKPCSKKTNEENK

SEQ ID NO: 2293 - protein, 40 aa, Plasmodium falciparum
HKDNEDAESVKSKKSVKEKGEKHNGKKPCSKKTNEENKNK

SEQ ID NO: 2294 - protein, 42 aa, Plasmodium falciparum
HKDNEDAESVKSKKSVKEKGEKHNGKKPCSKKTNEENKNKEK

SEQ ID NO: 2295 - protein, 47 aa, Plasmodium falciparum
HKDNEDAESVKSKKSVKEKGEKHNGKKPCSKKTNEENKNKEKTNNLK

SEQ ID NO: 2296 - protein, 22 aa, Plasmodium falciparum
KDNEDAESVKSKKSVKEKGEKH

SEQ ID NO: 2297 - protein, 13 aa, Plasmodium falciparum
KSKKSVKEKGEKH

SEQ ID NO: 2298 - protein, 11 aa, Plasmodium falciparum
KKSVKEKGEKH

SEQ ID NO: 2299 - protein, 10 aa, Plasmodium falciparum
KSVKEKGEKH

SEQ ID NO: 2300 - protein, 10 aa, Plasmodium falciparum
KEKGEKHNGK

SEQ ID NO: 2301 - protein, 11 aa, Plasmodium falciparum
KEKGEKHNGKK

SEQ ID NO: 2302 - protein, 8 aa, Plasmodium falciparum
KGEKHNGK

SEQ ID NO: 2303 - protein, 9 aa, Plasmodium falciparum
KGEKHNGKK

SEQ ID NO: 2304 - protein, 10 aa, Plasmodium falciparum
KHNGKKPCSK

SEQ ID NO: 2305 - protein, 11 aa, Plasmodium falciparum
KHNGKKPCSKK

SEQ ID NO: 2306 - protein, 16 aa, Plasmodium falciparum
HNGKKPCSKKTNEENK

SEQ ID NO: 2307 - protein, 18 aa, Plasmodium falciparum
HNGKKPCSKKTNEENKNK

SEQ ID NO: 2308 - protein, 20 aa, Plasmodium falciparum
HNGKKPCSKKTNEENKNKEK

SEQ ID NO: 2309 - protein, 25 aa, Plasmodium falciparum
HNGKKPCSKKTNEENKNKEKTNNLK

SEQ ID NO: 2310 - protein, 30 aa, Plasmodium falciparum
HNGKKPCSKKTNEENKNKEKTNNLKSDGSK

SEQ ID NO: 2311 - protein, 10 aa, Plasmodium falciparum
HNGKKPCSKK

SEQ ID NO: 2312 - protein, 37 aa, Plasmodium falciparum; identical to SEQ ID NO: 2081

SEQ ID NO: 2313 - protein, 42 aa, Plasmodium falciparum; identical to SEQ ID NO: 2082

SEQ ID NO: 2314 - protein, 43 aa, Plasmodium falciparum; identical to SEQ ID NO: 2083

SEQ ID NO: 2315 - protein, 25 aa, Plasmodium falciparum
HGAAHGSRYSSFSSVNKYGKHGDEK

SEQ ID NO: 2316 - protein, 18 aa, Plasmodium falciparum
HGSRYSSFSSVNKYGKHG

SEQ ID NO: 2317 - protein, 30 aa, Plasmodium falciparum; identical to SEQ ID NO: 2085

SEQ ID NO: 2318 - protein, 31 aa, Plasmodium falciparum; identical to SEQ ID NO: 2086

SEQ ID NO: 2319 - protein, 41 aa, Plasmodium falciparum; identical to SEQ ID NO: 2087

SEQ ID NO: 2320 - protein, 47 aa, Plasmodium falciparum; identical to SEQ ID NO: 2088

SEQ ID NO: 2321 - protein, 49 aa, Plasmodium falciparum; identical to SEQ ID NO: 2089

SEQ ID NO: 2322 - protein, 21 aa, Plasmodium falciparum
HGSRYSSFSSVNKYGKHGDEK

SEQ ID NO: 2323 - protein, 26 aa, Plasmodium falciparum
HGSRYSSFSSVNKYGKHGDEKHHSSK

SEQ ID NO: 2324 - protein, 27 aa, Plasmodium falciparum
HGSRYSSFSSVNKYGKHGDEKHHSSKK

SEQ ID NO: 2325 - protein, 37 aa, Plasmodium falciparum; identical to SEQ ID NO: 2093

SEQ ID NO: 2326 - protein, 43 aa, Plasmodium falciparum; identical to SEQ ID NO: 2094

SEQ ID NO: 2327 - protein, 45 aa, Plasmodium falciparum; identical to SEQ ID NO: 2095

SEQ ID NO: 2328 - protein, 51 aa, Plasmodium falciparum; identical to SEQ ID NO: 2096

SEQ ID NO: 2329 - protein, 9 aa, Plasmodium falciparum
KYGKHGDEK

SEQ ID NO: 2330 - protein, 11 aa, Plasmodium falciparum
KYGKHGDEKHH

SEQ ID NO: 2331 - protein, 10 aa, Plasmodium falciparum
KYGKHGDEKH

SEQ ID NO: 2332 - protein, 16 aa, Plasmodium falciparum
KYGKHGDEKHHSSKKH

SEQ ID NO: 2333 - protein, 32 aa, Plasmodium falciparum; identical to SEQ ID NO: 2101

SEQ ID NO: 2334 - protein, 35 aa, Plasmodium falciparum; identical to SEQ ID NO: 2102

SEQ ID NO: 2335 - protein, 45 aa, Plasmodium falciparum; identical to SEQ ID NO: 2103

SEQ ID NO: 2336 - protein, 11 aa, Plasmodium falciparum
KHGDEKHHSSK

SEQ ID NO: 2337 - protein, 13 aa, Plasmodium falciparum
KHGDEKHHSSKKH

SEQ ID NO: 2338 - protein, 29 aa, Plasmodium falciparum
KHGDEKHHSSKKHEGNDGEGEKKKKSKKH

SEQ ID NO: 2339 - protein, 32 aa, Plasmodium falciparum; identical to SEQ ID NO: 2107

SEQ ID NO: 2340 - protein, 42 aa, Plasmodium falciparum; identical to SEQ ID NO: 2108

SEQ ID NO: 2341 - protein, 11 aa, Plasmodium falciparum
HGDEKHHSSKK

SEQ ID NO: 2342 - protein, 21 aa, Plasmodium falciparum
HGDEKHHSSKKHEGNDGEGEK

SEQ ID NO: 2343 - protein, 27 aa, Plasmodium falciparum
HGDEKHHSSKKHEGNDGEGEKKKKSKK

SEQ ID NO: 2344 - protein, 29 aa, Plasmodium falciparum
HGDEKHHSSKKHEGNDGEGEKKKKSKKHK

SEQ ID NO: 2345 - protein, 35 aa, Plasmodium falciparum; identical to SEQ ID NO: 2113

SEQ ID NO: 2346 - protein, 36 aa, Plasmodium falciparum; identical to SEQ ID NO: 2114

SEQ ID NO: 2347 - protein, 37 aa, Plasmodium falciparum; identical to SEQ ID NO: 2115

SEQ ID NO: 2348 - protein, 39 aa, Plasmodium falciparum; identical to SEQ ID NO: 2116

SEQ ID NO: 2349 - protein, 51 aa, Plasmodium falciparum; identical to SEQ ID NO: 2117

SEQ ID NO: 2350 - protein, 42 aa, Plasmodium falciparum; identical to SEQ ID NO: 2118

SEQ ID NO: 2351 - protein, 7 aa, Plasmodium falciparum
KHHSSKK

SEQ ID NO: 2352 - protein, 8 aa, Plasmodium falciparum
KHHSSKKH

SEQ ID NO: 2353 - protein, 24 aa, Plasmodium falciparum
KHHSSKKHEGNDGEGEKKKKSKKH

SEQ ID NO: 2354 - protein, 27 aa, Plasmodium falciparum
KHHSSKKHEGNDGEGEKKKKSKKHKDH

SEQ ID NO: 2355 - protein, 37 aa, Plasmodium falciparum; identical to SEQ ID NO: 2123

SEQ ID NO: 2356 - protein, 51 aa, Plasmodium falciparum; identical to SEQ ID NO: 2124

SEQ ID NO: 2357 - protein, 16 aa, Plasmodium falciparum
HHSSKKHEGNDGEGEK

SEQ ID NO: 2358 - protein, 22 aa, Plasmodium falciparum
HHSSKKHEGNDGEGEKKKKSKK

SEQ ID NO: 2359 - protein, 24 aa, Plasmodium falciparum
HHSSKKHEGNDGEGEKKKKSKKHK

SEQ ID NO: 2360 - protein, 30 aa, Plasmodium falciparum; identical to SEQ ID NO: 2128

SEQ ID NO: 2361 - protein, 31 aa, Plasmodium falciparum; identical to SEQ ID NO: 2129

SEQ ID NO: 2362 - protein, 32 aa, Plasmodium falciparum; identical to SEQ ID NO: 2130

SEQ ID NO: 2363 - protein, 34 aa, Plasmodium falciparum; identical to SEQ ID NO: 2131

SEQ ID NO: 2364 - protein, 46 aa, Plasmodium falciparum; identical to SEQ ID NO: 2132

SEQ ID NO: 2365 - protein, 37 aa, Plasmodium falciparum; identical to SEQ ID NO: 2133

SEQ ID NO: 2366 - protein, 15 aa, Plasmodium falciparum
HSSKKHEGNDGEGEK

SEQ ID NO: 2367 - protein, 21 aa, Plasmodium falciparum
HSSKKHEGNDGEGEKKKKSKK

SEQ ID NO: 2368 - protein, 23 aa, Plasmodium falciparum
HSSKKHEGNDGEGEKKKKSKKHK

SEQ ID NO: 2369 - protein, 29 aa, Plasmodium falciparum
HSSKKHEGNDGEGEKKKKSKKHKDHDGEK

SEQ ID NO: 2370 - protein, 30 aa, Plasmodium falciparum; identical to SEQ ID NO: 2138

SEQ ID NO: 2371 - protein, 31 aa, Plasmodium falciparum; identical to SEQ ID NO: 2139

SEQ ID NO: 2372 - protein, 33 aa, Plasmodium falciparum; identical to SEQ ID NO: 2140

SEQ ID NO: 2373 - protein, 45 aa, Plasmodium falciparum; identical to SEQ ID NO: 2141

SEQ ID NO: 2374 - protein, 36 aa, Plasmodium falciparum; identical to SEQ ID NO: 2142

SEQ ID NO: 2375 - protein, 11 aa, Plasmodium falciparum
KHEGNDGEGEK

SEQ ID NO: 2376 - protein, 18 aa, Plasmodium falciparum
KHEGNDGEGEKKKKSKKH

SEQ ID NO: 2377 - protein, 21 aa, Plasmodium falciparum
KHEGNDGEGEKKKKSKKHKDH

SEQ ID NO: 2378 - protein, 31 aa, Plasmodium falciparum; identical to SEQ ID NO: 2146

SEQ ID NO: 2379 - protein, 45 aa, Plasmodium falciparum; identical to SEQ ID NO: 2147

SEQ ID NO: 2380 - protein, 18 aa, Plasmodium falciparum
HEGNDGEGEKKKKSKKHK

SEQ ID NO: 2381 - protein, 48 aa, Plasmodium falciparum; identical to SEQ ID NO: 2148

SEQ ID NO: 2382 - protein, 16 aa, Plasmodium falciparum
HEGNDGEGEKKKKSKK

SEQ ID NO: 2383 - protein, 18 aa, Plasmodium falciparum
HEGNDGEGEKKKKSKKHK

SEQ ID NO: 2384 - protein, 24 aa, Plasmodium falciparum
HEGNDGEGEKKKKSKKHKDHDGEK

SEQ ID NO: 2385 - protein, 25 aa, Plasmodium falciparum
HEGNDGEGEKKKKSKKHKDHDGEKK

SEQ ID NO: 2386 - protein, 26 aa, Plasmodium falciparum
HEGNDGEGEKKKKSKKHKDHDGEKKK

SEQ ID NO: 2387 - protein, 28 aa, Plasmodium falciparum
HEGNDGEGEKKKKSKKHKDHDGEKKKSK

SEQ ID NO: 2388 - protein, 40 aa, Plasmodium falciparum; identical to SEQ ID NO: 2155

SEQ ID NO: 2389 - protein, 31 aa, Plasmodium falciparum; identical to SEQ ID NO: 2156

SEQ ID NO: 2390 - protein, 51 aa, Plasmodium falciparum; identical to SEQ ID NO: 2157

SEQ ID NO: 2391 - protein, 8 aa, Plasmodium falciparum
KKKKSKKH

SEQ ID NO: 2392 - protein, 9 aa, Plasmodium falciparum
KKKKSKKHK

SEQ ID NO: 2393 - protein, 11 aa, Plasmodium falciparum
KKKKSKKHKDH

SEQ ID NO: 2394 - protein, 21 aa, Plasmodium falciparum
KKKKSKKHKDHDGEKKKSKKH

SEQ ID NO: 2395 - protein, 35 aa, Plasmodium falciparum; identical to SEQ ID NO: 2162

SEQ ID NO: 2396 - protein, 38 aa, Plasmodium falciparum; identical to SEQ ID NO: 2163

SEQ ID NO: 2397 - protein, 48 aa, Plasmodium falciparum; identical to SEQ ID NO: 2164

SEQ ID NO: 2398 - protein, 8 aa, Plasmodium falciparum
KKKSKKHK

SEQ ID NO: 2399 - protein, 10 aa, Plasmodium falciparum
KKKSKKHKDH

SEQ ID NO: 2400 - protein, 20 aa, Plasmodium falciparum
KKKSKKHKDHDGEKKKSKKH

SEQ ID NO: 2401 - protein, 34 aa, Plasmodium falciparum; identical to SEQ ID NO: 2168

SEQ ID NO: 2402 - protein, 37 aa, Plasmodium falciparum; identical to SEQ ID NO: 2169

SEQ ID NO: 2403 - protein, 47 aa, Plasmodium falciparum; identical to SEQ ID NO: 2170

SEQ ID NO: 2404 - protein, 7 aa, Plasmodium falciparum
KKSKKHK

SEQ ID NO: 2405 - protein, 9 aa, Plasmodium falciparum
KKSKKHKDH

SEQ ID NO: 2406 - protein, 19 aa, Plasmodium falciparum
KKSKKHKDHDGEKKKSKKH

SEQ ID NO: 2407 - protein, 33 aa, Plasmodium falciparum; identical to SEQ ID NO: 2174

SEQ ID NO: 2408 - protein, 36 aa, Plasmodium falciparum; identical to SEQ ID NO: 2175

SEQ ID NO: 2409 - protein, 46 aa, Plasmodium falciparum; identical to SEQ ID NO: 2176

SEQ ID NO: 2410 - protein, 10 aa, Plasmodium falciparum
KKHKDHDGEK

SEQ ID NO: 2411 - protein, 11 aa, Plasmodium falciparum
KKHKDHDGEKK

SEQ ID NO: 2412 - protein, 16 aa, Plasmodium falciparum
KKHKDHDGEKKKSKKH

SEQ ID NO: 2413 - protein, 30 aa, Plasmodium falciparum; identical to SEQ ID NO: 2180

SEQ ID NO: 2414 - protein, 33 aa, Plasmodium falciparum; identical to SEQ ID NO: 2181

SEQ ID NO: 2415 - protein, 43 aa, Plasmodium falciparum; identical to SEQ ID NO: 2182

SEQ ID NO: 2416 - protein, 9 aa, Plasmodium falciparum
KHKDHDGEK

SEQ ID NO: 2417 - protein, 10 aa, Plasmodium falciparum
KHKDHDGEKK

SEQ ID NO: 2418 - protein, 11 aa, Plasmodium falciparum
KHKDHDGEKKK

SEQ ID NO: 2419 - protein, 15 aa, Plasmodium falciparum
KHKDHDGEKKKSKKH

SEQ ID NO: 2420 - protein, 29 aa, Plasmodium falciparum
KHKDHDGEKKKSKKHKDNEDAESVKSKKH

SEQ ID NO: 2421 - protein, 32 aa, Plasmodium falciparum; identical to SEQ ID NO: 2188

SEQ ID NO: 2422 - protein, 42 aa, Plasmodium falciparum; identical to SEQ ID NO: 2189

SEQ ID NO: 2423 - protein, 8 aa, Plasmodium falciparum
HKDHDGEK

SEQ ID NO: 2424 - protein, 9 aa, Plasmodium falciparum
HKDHDGEKK

SEQ ID NO: 2425 - protein, 10 aa, Plasmodium falciparum
HKDHDGEKKK

SEQ ID NO: 2426 - protein, 12 aa, Plasmodium falciparum
HKDHDGEKKKSK

SEQ ID NO: 2427 - protein, 24 aa, Plasmodium falciparum
HKDHDGEKKKSKKHKDNEDAESVK

SEQ ID NO: 2428 - protein, 15 aa, Plasmodium falciparum
HKDHDGEKKKSKKHK

SEQ ID NO: 2429 - protein, 35 aa, Plasmodium falciparum; identical to SEQ ID NO: 2196

SEQ ID NO: 2430 - protein, 36 aa, Plasmodium falciparum; identical to SEQ ID NO: 2197

SEQ ID NO: 2431 - protein, 37 aa, Plasmodium falciparum; identical to SEQ ID NO: 2198

SEQ ID NO: 2432 - protein, 39 aa, Plasmodium falciparum; identical to SEQ ID NO: 2199

SEQ ID NO: 2433 - protein, 42 aa, Plasmodium falciparum; identical to SEQ ID NO: 2200

SEQ ID NO: 2434 - protein, 51 aa, Plasmodium falciparum; identical to SEQ ID NO: 2201

SEQ ID NO: 2435 - protein, 7 aa, Plasmodium falciparum
KDHDGEK

SEQ ID NO: 2436 - protein, 8 aa, Plasmodium falciparum
KDHDGEKK

SEQ ID NO: 2437 - protein, 9 aa, Plasmodium falciparum
KDHDGEKKK

SEQ ID NO: 2438 - protein, 11 aa, Plasmodium falciparum
KDHDGEKKKSK

SEQ ID NO: 2439 - protein, 13 aa, Plasmodium falciparum
KDHDGEKKKSKKH

SEQ ID NO: 2440 - protein, 27 aa, Plasmodium falciparum
KDHDGEKKKSKKHKDNEDAESVKSKKH

SEQ ID NO: 2441 - protein, 30 aa, Plasmodium falciparum; identical to SEQ ID NO: 2208

SEQ ID NO: 2442 - protein, 40 aa, Plasmodium falciparum; identical to SEQ ID NO: 2209

SEQ ID NO: 2443 - protein, 21 aa, Plasmodium falciparum
HDGEKKKSKKHKDNEDAESVK

SEQ ID NO: 2444 - protein, 12 aa, Plasmodium falciparum
HDGEKKKSKKHK

SEQ ID NO: 2445 - protein, 32 aa, Plasmodium falciparum; identical to SEQ ID NO: 2212

SEQ ID NO: 2446 - protein, 33 aa, Plasmodium falciparum; identical to SEQ ID NO: 2213

SEQ ID NO: 2447 - protein, 34 aa, Plasmodium falciparum; identical to SEQ ID NO: 2214

SEQ ID NO: 2448 - protein, 36 aa, Plasmodium falciparum; identical to SEQ ID NO: 2215

SEQ ID NO: 2449 - protein, 39 aa, Plasmodium falciparum; identical to SEQ ID NO: 2216

SEQ ID NO: 2450 - protein, 48 aa, Plasmodium falciparum; identical to SEQ ID NO: 2217

SEQ ID NO: 2451 - protein, 8 aa, Plasmodium falciparum
KKKSKKHK

SEQ ID NO: 2452 - protein, 21 aa, Plasmodium falciparum
KKKSKKHKDNEDAESVKSKKH

SEQ ID NO: 2453 - protein, 24 aa, Plasmodium falciparum
KKKSKKHKDNEDAESVKSKKHKSH

SEQ ID NO: 2454 - protein, 34 aa, Plasmodium falciparum; identical to SEQ ID NO: 2221

SEQ ID NO: 2455 - protein, 7 aa, Plasmodium falciparum
KKSKKHK

SEQ ID NO: 2456 - protein, 20 aa, Plasmodium falciparum
KKSKKHKDNEDAESVKSKKH

SEQ ID NO: 2457 - protein, 23 aa, Plasmodium falciparum
KKSKKHKDNEDAESVKSKKHKSH

SEQ ID NO: 2458 - protein, 33 aa, Plasmodium falciparum; identical to SEQ ID NO: 2225

SEQ ID NO: 2459 - protein, 11 aa, Plasmodium falciparum
HKDNEDAESVK

SEQ ID NO: 2460 - protein, 22 aa, Plasmodium falciparum
HKDNEDAESVKSKKHKSHDCEK

SEQ ID NO: 2461 - protein, 23 aa, Plasmodium falciparum
HKDNEDAESVKSKKHKSHDCEKK

SEQ ID NO: 2462 - protein, 24 aa, Plasmodium falciparum
HKDNEDAESVKSKKHKSHDCEKKK

SEQ ID NO: 2463 - protein, 26 aa, Plasmodium falciparum
HKDNEDAESVKSKKHKSHDCEKKKSK

SEQ ID NO: 2464 - protein, 29 aa, Plasmodium falciparum
HKDNEDAESVKSKKHKSHDCEKKKSKKHK

SEQ ID NO: 2465 - protein, 38 aa, Plasmodium falciparum; identical to SEQ ID NO: 2232

SEQ ID NO: 2466 - protein, 44 aa, Plasmodium falciparum; identical to SEQ ID NO: 2233

SEQ ID NO: 2467 - protein, 46 aa, Plasmodium falciparum; identical to SEQ ID NO: 2234

SEQ ID NO: 2468 - protein, 49 aa, Plasmodium falciparum; identical to SEQ ID NO: 2235

SEQ ID NO: 2469 - protein, 14 aa, Plasmodium falciparum
KDNEDAESVKSKKH

SEQ ID NO: 2470 - protein, 17 aa, Plasmodium falciparum
KDNEDAESVKSKKHKSH

SEQ ID NO: 2471 - protein, 27 aa, Plasmodium falciparum
KDNEDAESVKSKKHKSHDCEKKKSKKH

SEQ ID NO: 2472 - protein, 49 aa, Plasmodium falciparum; identical to SEQ ID NO: 2239

SEQ ID NO: 2473 - protein, 10 aa, Plasmodium falciparum
KKHKSHDCEK

SEQ ID NO: 2474 - protein, 11 aa, Plasmodium falciparum
KKHKSHDCEKK

SEQ ID NO: 2475 - protein, 16 aa, Plasmodium falciparum
KKHKSHDCEKKKSKKH

SEQ ID NO: 2476 - protein, 38 aa, Plasmodium falciparum; identical to SEQ ID NO: 2243

SEQ ID NO: 2477 - protein, 9 aa, Plasmodium falciparum
KHKSHDCEK

SEQ ID NO: 2478 - protein, 10 aa, Plasmodium falciparum
KHKSHDCEKK

SEQ ID NO: 2479 - protein, 11 aa, Plasmodium falciparum
KHKSHDCEKKK

SEQ ID NO: 2480 - protein, 15 aa, Plasmodium falciparum
KHKSHDCEKKKSKKH

SEQ ID NO: 2481 - protein, 37 aa, Plasmodium falciparum; identical to SEQ ID NO: 2248

SEQ ID NO: 2482 - protein, 8 aa, Plasmodium falciparum
HKSHDCEK

SEQ ID NO: 2483 - protein, 9 aa, Plasmodium falciparum
HKSHDCEKK

SEQ ID NO: 2484 - protein, 10 aa, Plasmodium falciparum
HKSHDCEKKK

SEQ ID NO: 2485 - protein, 12 aa, Plasmodium falciparum
HKSHDCEKKKSK

SEQ ID NO: 2486 - protein, 15 aa, Plasmodium falciparum
HKSHDCEKKKSKKHK

SEQ ID NO: 2487 - protein, 24 aa, Plasmodium falciparum
HKSHDCEKKKSKKHKDNEDAESVK

SEQ ID NO: 2488 - protein, 30 aa, Plasmodium falciparum; identical to SEQ ID NO: 2255

SEQ ID NO: 2489 - protein, 32 aa, Plasmodium falciparum; identical to SEQ ID NO: 2256

SEQ ID NO: 2490 - protein, 35 aa, Plasmodium falciparum; identical to SEQ ID NO: 2257

SEQ ID NO: 2491 - protein, 39 aa, Plasmodium falciparum; identical to SEQ ID NO: 2258

SEQ ID NO: 2492 - protein, 40 aa, Plasmodium falciparum; identical to SEQ ID NO: 2259

SEQ ID NO: 2493 - protein, 44 aa, Plasmodium falciparum; identical to SEQ ID NO: 2260

SEQ ID NO: 2494 - protein, 45 aa, Plasmodium falciparum; identical to SEQ ID NO: 2261

SEQ ID NO: 2495 - protein, 51 aa, Plasmodium falciparum; identical to SEQ ID NO: 2262

SEQ ID NO: 2496 - protein, 8 aa, Plasmodium falciparum
KSHDCEKK

SEQ ID NO: 2497 - protein, 9 aa, Plasmodium falciparum
KSHDCEKKK

SEQ ID NO: 2498 - protein, 11 aa, Plasmodium falciparum
KSHDCEKKKSK

SEQ ID NO: 2499 - protein, 13 aa, Plasmodium falciparum
KSHDCEKKKSKKH

SEQ ID NO: 2500 - protein, 35 aa, Plasmodium falciparum; identical to SEQ ID NO: 2267

SEQ ID NO: 2501 - protein, 7 aa, Plasmodium falciparum
KSHDCEK

SEQ ID NO: 2502 - protein, 12 aa, Plasmodium falciparum
HDCEKKKSKKHK

SEQ ID NO: 2503 - protein, 21 aa, Plasmodium falciparum
HDCEKKKSKKHKDNEDAESVK

SEQ ID NO: 2504 - protein, 27 aa, Plasmodium falciparum
HDCEKKKSKKHKDNEDAESVKSKKSVK

SEQ ID NO: 2505 - protein, 29 aa, Plasmodium falciparum
HDCEKKKSKKHKDNEDAESVKSKKSVKEK

SEQ ID NO: 2506 - protein, 32 aa, Plasmodium falciparum; identical to SEQ ID NO: 2273

SEQ ID NO: 2507 - protein, 36 aa, Plasmodium falciparum; identical to SEQ ID NO: 2274

SEQ ID NO: 2508 - protein, 37 aa, Plasmodium falciparum; identical to SEQ ID NO: 2275

SEQ ID NO: 2509 - protein, 41 aa, Plasmodium falciparum; identical to SEQ ID NO: 2276

SEQ ID NO: 2510 - protein, 42 aa, Plasmodium falciparum; identical to SEQ ID NO: 2277

SEQ ID NO: 2511 - protein, 48 aa, Plasmodium falciparum; identical to SEQ ID NO: 2278

SEQ ID NO: 2512 - protein, 50 aa, Plasmodium falciparum; identical to SEQ ID NO: 2279

SEQ ID NO: 2513 - protein, 8 aa, Plasmodium falciparum
KKKSKKHK

SEQ ID NO: 2514 - protein, 29 aa, Plasmodium falciparum
KKKSKKHKDNEDAESVKSKKSVKEKGEKH

SEQ ID NO: 2515 - protein, 7 aa, Plasmodium falciparum
KKSKKHK

SEQ ID NO: 2516 - protein, 28 aa, Plasmodium falciparum
KKSKKHKDNEDAESVKSKKSVKEKGEKH

SEQ ID NO: 2517 - protein, 11 aa, Plasmodium falciparum
HKDNEDAESVK

SEQ ID NO: 2518 - protein, 17 aa, Plasmodium falciparum
HKDNEDAESVKSKKSVK

SEQ ID NO: 2519 - protein, 19 aa, Plasmodium falciparum
HKDNEDAESVKSKKSVKEK

SEQ ID NO: 2520 - protein, 22 aa, Plasmodium falciparum
HKDNEDAESVKSKKSVKEKGEK

SEQ ID NO: 2521 - protein, 26 aa, Plasmodium falciparum
HKDNEDAESVKSKKSVKEKGEKHNGK

SEQ ID NO: 2522 - protein, 27 aa, Plasmodium falciparum
HKDNEDAESVKSKKSVKEKGEKHNGKK

SEQ ID NO: 2523 - protein, 31 aa, Plasmodium falciparum; identical to SEQ ID NO: 2290

SEQ ID NO: 2524 - protein, 32 aa, Plasmodium falciparum; identical to SEQ ID NO: 2291

SEQ ID NO: 2525 - protein, 38 aa, Plasmodium falciparum; identical to SEQ ID NO: 2292

SEQ ID NO: 2526 - protein, 40 aa, Plasmodium falciparum; identical to SEQ ID NO: 2293

SEQ ID NO: 2527 - protein, 42 aa, Plasmodium falciparum; identical to SEQ ID NO: 2294

SEQ ID NO: 2528 - protein, 47 aa, Plasmodium falciparum; identical to SEQ ID NO: 2295

SEQ ID NO: 2529 - protein, 22 aa, Plasmodium falciparum
KDNEDAESVKSKKSVKEKGEKH

SEQ ID NO: 2530 - protein, 13 aa, Plasmodium falciparum
KSKKSVKEKGEKH

SEQ ID NO: 2531 - protein, 11 aa, Plasmodium falciparum
KKSVKEKGEKH

SEQ ID NO: 2532 - protein, 10 aa, Plasmodium falciparum
KSVKEKGEKH

SEQ ID NO: 2533 - protein, 10 aa, Plasmodium falciparum
KEKGEKHNGK

SEQ ID NO: 2534 - protein, 11 aa, Plasmodium falciparum
KEKGEKHNGKK

SEQ ID NO: 2535 - protein, 8 aa, Plasmodium falciparum
KGEKHNGK

SEQ ID NO: 2536 - protein, 9 aa, Plasmodium falciparum
KGEKHNGKK

SEQ ID NO: 2537 - protein, 10 aa, Plasmodium falciparum
KHNGKKPCSK

SEQ ID NO: 2538 - protein, 11 aa, Plasmodium falciparum
KHNGKKPCSKK

SEQ ID NO: 2539 - protein, 16 aa, Plasmodium falciparum
HNGKKPCSKKTNEENK

SEQ ID NO: 2540 - protein, 18 aa, Plasmodium falciparum
HNGKKPCSKKTNEENKNK

SEQ ID NO: 2541 - protein, 20 aa, Plasmodium falciparum
HNGKKPCSKKTNEENKNKEK

SEQ ID NO: 2542 - protein, 25 aa, Plasmodium falciparum
HNGKKPCSKKTNEENKNKEKTNNLK

SEQ ID NO: 2543 - protein, 30 aa, Plasmodium falciparum; identical to SEQ ID NO: 2310

SEQ ID NO: 2544 - protein, 10 aa, Plasmodium falciparum
HNGKKPCSKK

SEQ ID NO: 2545 - protein, 1984 aa, Plasmodium falciparum
IFRYSLCIHKKKNIFVELYFNINYPFSYMHLMCTGLRNEKLINDRKILYGECNLNIKSDSFIILLFKEIMNPFFIFQIFAMIVWSLDNYIEYTISILFITSISIILELKNTIKNQKKIKNMLNYTCPINVYRYNTSYIISSSELVPGDIYEIKNNMTIPCDTIILSGSVTMSEHMLTGESVPIHKERLPFEGNAIINKNNKYDSNDEKDDYLRIYNNHASINMIKRNHLIEETLGKKDREYKSNTHDLCSMNKLCYINNTYDDVHMKNNKMDYNNNNNNKKKKKINNLNFVKGTYINSNDLLYDDKIGVNIFEDDVNNMKHKFNQRNINYYNKDTNNLEYNNKHRYIYDCLLKKVEAISQKNKIIYSNEDINKYMLYGGTYVLSLYNINKIKYNNKEENRILGLVIKTGFITTKGKIVNNILYHKKKELNLINDSYKFLIILIIYALFSVFILLYITLSNNEYTNHIIIKCLDIITDAIPPALPTTLTVGISIAISRLKKKFSISCLCPHKINIAGQINTMVFDKTGTLTENNLQFIGIITQNKKNKNMLSDFIHIKEMNTESYIHSKDDNMIHNKNSIISEYYIKDNMKNLHTSSKKKSITKERSNFLVQTIKSCLLKDHYIKEKKKEYYTNNTYCNDLHINDSTCSSYLLNSETKDAYCEYYNIDHLCDINKKNMDINSKNELMGKYSKNELMGKTIKNELMGKYSKNELMGKYSKNELMGKYSKNELMGKYSKNELMGKYSKNELMGKTIKNQVGVDTNIYHMNCDNDYNYDYPCDYNCNNCNDTYHRLEYHNINKDNSFNIPPEKNKSYNNISEHIKINYPLLFEALACCHTLSKVNNKIMGDVLEILMFNFTNCDMLINNNSFIIKEKKKNCSYDFQKIDGDKNIGANDERCHLNNNLVSYNILKRFEFQSRLQRMSVIVKSTYGNNNDDNNDDDNNNDDDNNDDNNNDDNNNDDNNDDNNNNNYYYNIFCKGSPEKIKELCLKSKIPNNYDEILNKYTKQGMRILSISYKRVKSKNINLLNVKRSFVESNLHFLGFLIFTNNMKKNAPDIIHNLQTSGCQCIMSTGDNVLTSIHVAKKCGIINSNVESIIIGDVIPVVGKNNKQKKKLVWYNHKNDTYLKGHDKTCIDNEFTSIQSQMNSDNICGDNICGDNIYGDNICGDNIYGDNINGDNINGDNIYGDNINGDNINGDNINTYDNIYGDNYNLDYCPTEYHKCTYNNSILYRNNFLYKKENKKDKNYKNISTLYEHRTNDIQFDKLCDILINKDPRNVNIVLTGKAFIFLKKKFYSFHLPYYEECKNIVHYIMKKKHKKIKNIINNHNSNLYYHYNIIDTFVKRMNKEYMCFNKLLYKIQQKLLYNLIHNLYKKKKYMNNYYDIDEVHLIGNNNNNNNKNNSKEKKLPLKNKMKHIRKNESNDNITFNTYTSNNIHLSKYKYVHHKNYYYPDSCTNLRKKKNSLFYNLKKYIYYEKKKYLQHCLLKHDNYKKVELPRIKDINYSYQMESIKTRNFIHSLSEQFAFSNLILSFYIIKNDDNNVYNKNYIYNKNYIYNKNSICNKNYICNKNYIYNKNNIYNKNNIYNKKNILTHAKSVLLSGSSKKFLKFFSNIIRRHKLKEKKNKKNIKRYKMNHVNNTSKGHIILNMCTHGFKKDYSSLKNKYRIVNNKRYMLKNDNVYDRHMYNLTDMYRGTQYGCSKKKNKNIYMNNNNNILKNKINRFLEHLLVDKCKRNICHKYTDIKNIKLSIYEYILRTCTVYARMKPKDKSDLILSLKKLPNNSYVGMCGDGANDCLALSCADIGISLCNNNESSICSSFTSNKLCLHSIVHILIEGRASLVNSFQLFKFISLYSIMQCSQVLILYSISNKLTDNQYIFIDIVTILPLSIFMCWTSASEKLSKNIPIGKLFSFPILISIYGQIIIQLFFVMISLVVLMNLSFYKYDKNKVMKEKSDDTYLYKAQKYTLIYSLLFSKFVYVYIFKYKE

SEQ ID NO: 2546 - protein, 38 aa, Plasmodium falciparum
HKKKNIFVELYFNINYPFSYMHLMCTGLRNEKLINDRK

SEQ ID NO: 2547 - protein, 17 aa, Plasmodium falciparum
HLMCTGLRNEKLINDRK

SEQ ID NO: 2548 - protein, 38 aa, Plasmodium falciparum
HLMCTGLRNEKLINDRKILYGECNLNIKSDSFIILLFK

SEQ ID NO: 2549 - protein, 35 aa, Plasmodium falciparum
HMLTGESVPIHKERLPFEGNAIINKNNKYDSNDEK

SEQ ID NO: 2550 - protein, 25 aa, Plasmodium falciparum
HKERLPFEGNAIINKNNKYDSNDEK

SEQ ID NO: 2551 - protein, 21 aa, Plasmodium falciparum
KNNKYDSNDEKDDYLRIYNNH

SEQ ID NO: 2552 - protein, 31 aa, Plasmodium falciparum
KNNKYDSNDEKDDYLRIYNNHASINMIKRNH

SEQ ID NO: 2553 - protein, 49 aa, Plasmodium falciparum
KNNKYDSNDEKDDYLRIYNNHASINMIKRNHLIEETLGKKDREYKSNTH

SEQ ID NO: 2554 - protein, 18 aa, Plasmodium falciparum
KYDSNDEKDDYLRIYNNH

SEQ ID NO: 2555 - protein, 28 aa, Plasmodium falciparum
KYDSNDEKDDYLRIYNNHASINMIKRNH

SEQ ID NO: 2556 - protein, 46 aa, Plasmodium falciparum
KYDSNDEKDDYLRIYNNHASINMIKRNHLIEETLGKKDREYKSNTH

SEQ ID NO: 2557 - protein, 25 aa, Plasmodium falciparum
HASINMIKRNHLIEETLGKKDREYK

SEQ ID NO: 2558 - protein, 15 aa, Plasmodium falciparum
HLIEETLGKKDREYK

SEQ ID NO: 2559 - protein, 11 aa, Plasmodium falciparum
KKDREYKSNTH

SEQ ID NO: 2560 - protein, 30 aa, Plasmodium falciparum
KKDREYKSNTHDLCSMNKLCYINNTYDDVH

SEQ ID NO: 2561 - protein, 35 aa, Plasmodium falciparum
HDLCSMNKLCYINNTYDDVHMKNNKMDYNNNNNNK

SEQ ID NO: 2562 - protein, 47 aa, Plasmodium falciparum
HDLCSMNKLCYINNTYDDVHMKNNKMDYNNNNNNKKKKKINNLNFVK

SEQ ID NO: 2563 - protein, 16 aa, Plasmodium falciparum
HMKNNKMDYNNNNNNK

SEQ ID NO: 2564 - protein, 28 aa, Plasmodium falciparum
HMKNNKMDYNNNNNNKKKKKINNLNFVK

SEQ ID NO: 2565 - protein, 40 aa, Plasmodium falciparum
KKKINNLNFVKGTYINSNDLLYDDKIGVNIFEDDVNNMKH

SEQ ID NO: 2566 - protein, 39 aa, Plasmodium falciparum
KKINNLNFVKGTYINSNDLLYDDKIGVNIFEDDVNNMKH

SEQ ID NO: 2567 - protein, 38 aa, Plasmodium falciparum
KINNLNFVKGTYINSNDLLYDDKIGVNIFEDDVNNMKH

SEQ ID NO: 2568 - protein, 23 aa, Plasmodium falciparum
HKFNQRNINYYNKDTNNLEYNNK

SEQ ID NO: 2569 - protein, 33 aa, Plasmodium falciparum
HKFNQRNINYYNKDTNNLEYNNKHRYIYDCLLK

SEQ ID NO: 2570 - protein, 41 aa, Plasmodium falciparum
HKFNQRNINYYNKDTNNLEYNNKHRYIYDCLLKKVEAISQK

SEQ ID NO: 2571 - protein, 43 aa, Plasmodium falciparum
HKFNQRNINYYNKDTNNLEYNNKHRYIYDCLLKKVEAISQKNK

SEQ ID NO: 2572 - protein, 12 aa, Plasmodium falciparum
KDTNNLEYNNKH

SEQ ID NO: 2573 - protein, 11 aa, Plasmodium falciparum
KHRYIYDCLLK

SEQ ID NO: 2574 - protein, 18 aa, Plasmodium falciparum
HRYIYDCLLKKVEAISQK

SEQ ID NO: 2575 - protein, 20 aa, Plasmodium falciparum
HRYIYDCLLKKVEAISQKNK

SEQ ID NO: 2576 - protein, 30 aa, Plasmodium falciparum
HRYIYDCLLKKVEAISQKNKIIYSNEDINK

SEQ ID NO: 2577 - protein, 35 aa, Plasmodium falciparum
KIKYNNKEENRILGLVIKTGFITTKGKIVNNILYH

SEQ ID NO: 2578 - protein, 18 aa, Plasmodium falciparum
KTGFITTKGKIVNNILYH

SEQ ID NO: 2579 - protein, 10 aa, Plasmodium falciparum
KIVNNILYHK

SEQ ID NO: 2580 - protein, 11 aa, Plasmodium falciparum
KIVNNILYHKK

SEQ ID NO: 2581 - protein, 51 aa, Plasmodium falciparum
KIVNNILYHKKKELNLINDSYKFLIILIIYALFSVFILLYITLSNNEYTNH

SEQ ID NO: 2582 - protein, 14 aa, Plasmodium falciparum
HKKKELNLINDSYK

SEQ ID NO: 2583 - protein, 46 aa, Plasmodium falciparum
HIIIKCLDIITDAIPPALPTTLTVGISIAISRLKKKFSISCLCPHK

SEQ ID NO: 2584 - protein, 11 aa, Plasmodium falciparum
KFSISCLCPHK

SEQ ID NO: 2585 - protein, 48 aa, Plasmodium falciparum
HKINIAGQINTMVFDKTGTLTENNLQFIGIITQNKKNKNMLSDFIHIK

SEQ ID NO: 2586 - protein, 11 aa, Plasmodium falciparum
KNMLSDFIHIK

SEQ ID NO: 2587 - protein, 20 aa, Plasmodium falciparum
KNMLSDFIHIKEMNTESYIH

SEQ ID NO: 2588 - protein, 28 aa, Plasmodium falciparum
KNMLSDFIHIKEMNTESYIHSKDDNMIH

SEQ ID NO: 2589 - protein, 47 aa, Plasmodium falciparum
KNMLSDFIHIKEMNTESYIHSKDDNMIHNKNSIISEYYIKDNMKNLH

SEQ ID NO: 2590 - protein, 22 aa, Plasmodium falciparum
HIKEMNTESYIHSKDDNMIHNK

SEQ ID NO: 2591 - protein, 32 aa, Plasmodium falciparum
HIKEMNTESYIHSKDDNMIHNKNSIISEYYIK

SEQ ID NO: 2592 - protein, 49 aa, Plasmodium falciparum
HIKEMNTESYIHSKDDNMIHNKNSIISEYYIKDNMKNLHTSSKKKSITK

SEQ ID NO: 2593 - protein, 43 aa, Plasmodium falciparum
HIKEMNTESYIHSKDDNMIHNKNSIISEYYIKDNMKNLHTSSK

SEQ ID NO: 2594 - protein, 44 aa, Plasmodium falciparum
HIKEMNTESYIHSKDDNMIHNKNSIISEYYIKDNMKNLHTSSKK

SEQ ID NO: 2595 - protein, 45 aa, Plasmodium falciparum
HIKEMNTESYIHSKDDNMIHNKNSIISEYYIKDNMKNLHTSSKKK

SEQ ID NO: 2596 - protein, 11 aa, Plasmodium falciparum
HSKDDNMIHNK

SEQ ID NO: 2597 - protein, 21 aa, Plasmodium falciparum
HSKDDNMIHNKNSIISEYYIK

SEQ ID NO: 2598 - protein, 38 aa, Plasmodium falciparum
HSKDDNMIHNKNSIISEYYIKDNMKNLHTSSKKKSITK

SEQ ID NO: 2599 - protein, 32 aa, Plasmodium falciparum
HSKDDNMIHNKNSIISEYYIKDNMKNLHTSSK

SEQ ID NO: 2600 - protein, 33 aa, Plasmodium falciparum
HSKDDNMIHNKNSIISEYYIKDNMKNLHTSSKK

SEQ ID NO: 2601 - protein, 34 aa, Plasmodium falciparum
HSKDDNMIHNKNSIISEYYIKDNMKNLHTSSKKK

SEQ ID NO: 2602 - protein, 9 aa, Plasmodium falciparum
KDDNMIHNK

SEQ ID NO: 2603 - protein, 26 aa, Plasmodium falciparum
KDDNMIHNKNSIISEYYIKDNMKNLH

SEQ ID NO: 2604 - protein, 13 aa, Plasmodium falciparum
HNKNSIISEYYIK

SEQ ID NO: 2605 - protein, 30 aa, Plasmodium falciparum
HNKNSIISEYYIKDNMKNLHTSSKKKSITK

SEQ ID NO: 2606 - protein, 24 aa, Plasmodium falciparum
HNKNSIISEYYIKDNMKNLHTSSK

SEQ ID NO: 2607 - protein, 25 aa, Plasmodium falciparum
HNKNSIISEYYIKDNMKNLHTSSKK

SEQ ID NO: 2608 - protein, 26 aa, Plasmodium falciparum
HNKNSIISEYYIKDNMKNLHTSSKKK

SEQ ID NO: 2609 - protein, 51 aa, Plasmodium falciparum
HNKNSIISEYYIKDNMKNLHTSSKKKSITKERSNFLVQTIKSCLLKDHYIK

SEQ ID NO: 2610 - protein, 18 aa, Plasmodium falciparum
KNSIISEYYIKDNMKNLH

SEQ ID NO: 2611 - protein, 46 aa, Plasmodium falciparum
KNSIISEYYIKDNMKNLHTSSKKKSITKERSNFLVQTIKSCLLKDH

SEQ ID NO: 2612 - protein, 8 aa, Plasmodium falciparum
KNLHTSSK

SEQ ID NO: 2613 - protein, 9 aa, Plasmodium falciparum
KNLHTSSKK

SEQ ID NO: 2614 - protein, 10 aa, Plasmodium falciparum
KNLHTSSKKK

SEQ ID NO: 2615 - protein, 32 aa, Plasmodium falciparum
KNLHTSSKKKSITKERSNFLVQTIKSCLLKDH

SEQ ID NO: 2616 - protein, 11 aa, Plasmodium falciparum
HTSSKKKSITK

SEQ ID NO: 2617 - protein, 32 aa, Plasmodium falciparum
HTSSKKKSITKERSNFLVQTIKSCLLKDHYIK

SEQ ID NO: 2618 - protein, 34 aa, Plasmodium falciparum
HTSSKKKSITKERSNFLVQTIKSCLLKDHYIKEK

SEQ ID NO: 2619 - protein, 35 aa, Plasmodium falciparum
HTSSKKKSITKERSNFLVQTIKSCLLKDHYIKEKK

SEQ ID NO: 2620 - protein, 36 aa, Plasmodium falciparum
HTSSKKKSITKERSNFLVQTIKSCLLKDHYIKEKKK

SEQ ID NO: 2621 - protein, 25 aa, Plasmodium falciparum
KKKSITKERSNFLVQTIKSCLLKDH

SEQ ID NO: 2622 - protein, 45 aa, Plasmodium falciparum
KKKSITKERSNFLVQTIKSCLLKDHYIKEKKKEYYTNNTYCNDLH

SEQ ID NO: 2623 - protein, 11 aa, Plasmodium falciparum
KSCLLKDHYIK

SEQ ID NO: 2624 - protein, 28 aa, Plasmodium falciparum
KSCLLKDHYIKEKKKEYYTNNTYCNDLH

SEQ ID NO: 2625 - protein, 8 aa, Plasmodium falciparum
KDHYIKEK

SEQ ID NO: 2626 - protein, 9 aa, Plasmodium falciparum
KDHYIKEKK

SEQ ID NO: 2627 - protein, 10 aa, Plasmodium falciparum
KDHYIKEKKK

SEQ ID NO: 2628 - protein, 23 aa, Plasmodium falciparum
KDHYIKEKKKEYYTNNTYCNDLH

SEQ ID NO: 2629 - protein, 50 aa, Plasmodium falciparum
KDHYIKEKKKEYYTNNTYCNDLHINDSTCSSYLLNSETKDAYCEYYNIDH

SEQ ID NO: 2630 - protein, 42 aa, Plasmodium falciparum
HINDSTCSSYLLNSETKDAYCEYYNIDHLCDINKKNMDINSK

SEQ ID NO: 2631 - protein, 48 aa, Plasmodium falciparum
HINDSTCSSYLLNSETKDAYCEYYNIDHLCDINKKNMDINSKNELMGK

SEQ ID NO: 2632 - protein, 51 aa, Plasmodium falciparum
HINDSTCSSYLLNSETKDAYCEYYNIDHLCDINKKNMDINSKNELMGKYSK

SEQ ID NO: 2633 - protein, 15 aa, Plasmodium falciparum
HLCDINKKNMDINSK

SEQ ID NO: 2634 - protein, 21 aa, Plasmodium falciparum
HLCDINKKNMDINSKNELMGK

SEQ ID NO: 2635 - protein, 24 aa, Plasmodium falciparum
HLCDINKKNMDINSKNELMGKYSK

SEQ ID NO: 2636 - protein, 39 aa, Plasmodium falciparum
HLCDINKKNMDINSKNELMGKYSKNELMGKTIKNELMGK

SEQ ID NO: 2637 - protein, 30 aa, Plasmodium falciparum
HLCDINKKNMDINSKNELMGKYSKNELMGK

SEQ ID NO: 2638 - protein, 42 aa, Plasmodium falciparum
HLCDINKKNMDINSKNELMGKYSKNELMGKTIKNELMGKYSK

SEQ ID NO: 2639 - protein, 33 aa, Plasmodium falciparum
HLCDINKKNMDINSKNELMGKYSKNELMGKTIK

SEQ ID NO: 2640 - protein, 48 aa, Plasmodium falciparum
HLCDINKKNMDINSKNELMGKYSKNELMGKTIKNELMGKYSKNELMGK

SEQ ID NO: 2641 - protein, 51 aa, Plasmodium falciparum
HLCDINKKNMDINSKNELMGKYSKNELMGKTIKNELMGKYSKNELMGKYSK

SEQ ID NO: 2642 - protein, 51 aa, Plasmodium falciparum
KYSKNELMGKYSKNELMGKYSKNELMGKYSKNELMGKTIKNQVGVDTNIYH

SEQ ID NO: 2643 - protein, 48 aa, Plasmodium falciparum
KNELMGKYSKNELMGKYSKNELMGKYSKNELMGKTIKNQVGVDTNIYH

SEQ ID NO: 2644 - protein, 42 aa, Plasmodium falciparum
KYSKNELMGKYSKNELMGKYSKNELMGKTIKNQVGVDTNIYH

SEQ ID NO: 2645 - protein, 39 aa, Plasmodium falciparum
KNELMGKYSKNELMGKYSKNELMGKTIKNQVGVDTNIYH

SEQ ID NO: 2646 - protein, 33 aa, Plasmodium falciparum
KYSKNELMGKYSKNELMGKTIKNQVGVDTNIYH

SEQ ID NO: 2647 - protein, 30 aa, Plasmodium falciparum
KNELMGKYSKNELMGKTIKNQVGVDTNIYH

SEQ ID NO: 2648 - protein, 24 aa, Plasmodium falciparum
KYSKNELMGKTIKNQVGVDTNIYH

SEQ ID NO: 2649 - protein, 49 aa, Plasmodium falciparum
KYSKNELMGKTIKNQVGVDTNIYHMNCDNDYNYDYPCDYNCNNCNDTYH

SEQ ID NO: 2650 - protein, 21 aa, Plasmodium falciparum
KNELMGKTIKNQVGVDTNIYH

SEQ ID NO: 2651 - protein, 46 aa, Plasmodium falciparum
KNELMGKTIKNQVGVDTNIYHMNCDNDYNYDYPCDYNCNNCNDTYH

SEQ ID NO: 2652 - protein, 20 aa, Plasmodium falciparum
HRLEYHNINKDNSFNIPPEK

SEQ ID NO: 2653 - protein, 32 aa, Plasmodium falciparum
HRLEYHNINKDNSFNIPPEKNKSYNNISEHIK

SEQ ID NO: 2654 - protein, 15 aa, Plasmodium falciparum
HNINKDNSFNIPPEK

SEQ ID NO: 2655 - protein, 27 aa, Plasmodium falciparum
HNINKDNSFNIPPEKNKSYNNISEHIK

SEQ ID NO: 2656 - protein, 21 aa, Plasmodium falciparum
KDNSFNIPPEKNKSYNNISEH

SEQ ID NO: 2657 - protein, 37 aa, Plasmodium falciparum
KDNSFNIPPEKNKSYNNISEHIKINYPLLFEALACCH

SEQ ID NO: 2658 - protein, 11 aa, Plasmodium falciparum
KSYNNISEHIK

SEQ ID NO: 2659 - protein, 25 aa, Plasmodium falciparum
KSYNNISEHIKINYPLLFEALACCH

SEQ ID NO: 2660 - protein, 49 aa, Plasmodium falciparum
HTLSKVNNKIMGDVLEILMFNFTNCDMLINNNSFIIKEKKKNCSYDFQK

SEQ ID NO: 2661 - protein, 26 aa, Plasmodium falciparum
KKKNCSYDFQKIDGDKNIGANDERCH

SEQ ID NO: 2662 - protein, 25 aa, Plasmodium falciparum
KKNCSYDFQKIDGDKNIGANDERCH

SEQ ID NO: 2663 - protein, 24 aa, Plasmodium falciparum
KNCSYDFQKIDGDKNIGANDERCH

SEQ ID NO: 2664 - protein, 20 aa, Plasmodium falciparum
KSKNINLLNVKRSFVESNLH

SEQ ID NO: 2665 - protein, 40 aa, Plasmodium falciparum
KSKNINLLNVKRSFVESNLHFLGFLIFTNNMKKNAPDIIH

SEQ ID NO: 2666 - protein, 18 aa, Plasmodium falciparum
KNINLLNVKRSFVESNLH

SEQ ID NO: 2667 - protein, 38 aa, Plasmodium falciparum
KNINLLNVKRSFVESNLHFLGFLIFTNNMKKNAPDIIH

SEQ ID NO: 2668 - protein, 33 aa, Plasmodium falciparum
HVAKKCGIINSNVESIIIGDVIPVVGKNNKQKK

SEQ ID NO: 2669 - protein, 34 aa, Plasmodium falciparum
HVAKKCGIINSNVESIIIGDVIPVVGKNNKQKKK

SEQ ID NO: 2670 - protein, 41 aa, Plasmodium falciparum
HVAKKCGIINSNVESIIIGDVIPVVGKNNKQKKKLVWYNHK

SEQ ID NO: 2671 - protein, 47 aa, Plasmodium falciparum
HVAKKCGIINSNVESIIIGDVIPVVGKNNKQKKKLVWYNHKNDTYLK

SEQ ID NO: 2672 - protein, 51 aa, Plasmodium falciparum
HVAKKCGIINSNVESIIIGDVIPVVGKNNKQKKKLVWYNHKNDTYLKGHDK

SEQ ID NO: 2673 - protein, 14 aa, Plasmodium falciparum
KNNKQKKKLVWYNH

SEQ ID NO: 2674 - protein, 23 aa, Plasmodium falciparum
KNNKQKKKLVWYNHKNDTYLKGH

SEQ ID NO: 2675 - protein, 10 aa, Plasmodium falciparum
KKKLVWYNHK

SEQ ID NO: 2676 - protein, 18 aa, Plasmodium falciparum
KKKLVWYNHKNDTYLKGH

SEQ ID NO: 2677 - protein, 9 aa, Plasmodium falciparum
KKLVWYNHK

SEQ ID NO: 2678 - protein, 17 aa, Plasmodium falciparum
KKLVWYNHKNDTYLKGH

SEQ ID NO: 2679 - protein, 8 aa, Plasmodium falciparum
KLVWYNHK

SEQ ID NO: 2680 - protein, 16 aa, Plasmodium falciparum
KLVWYNHKNDTYLKGH

SEQ ID NO: 2681 - protein, 8 aa, Plasmodium falciparum
HKNDTYLK

SEQ ID NO: 2682 - protein, 12 aa, Plasmodium falciparum
HKNDTYLKGHDK

SEQ ID NO: 2683 - protein, 9 aa, Plasmodium falciparum
KNDTYLKGH

SEQ ID NO: 2684 - protein, 11 aa, Plasmodium falciparum
KNDTYLKGHDK

SEQ ID NO: 2685 - protein, 25 aa, Plasmodium falciparum
HKCTYNNSILYRNNFLYKKENKKDK

SEQ ID NO: 2686 - protein, 28 aa, Plasmodium falciparum
HKCTYNNSILYRNNFLYKKENKKDKNYK

SEQ ID NO: 2687 - protein, 19 aa, Plasmodium falciparum
KKENKKDKNYKNISTLYEH

SEQ ID NO: 2688 - protein, 18 aa, Plasmodium falciparum
KENKKDKNYKNISTLYEH

SEQ ID NO: 2689 - protein, 15 aa, Plasmodium falciparum
KKDKNYKNISTLYEH

SEQ ID NO: 2690 - protein, 18 aa, Plasmodium falciparum
HRTNDIQFDKLCDILINK

SEQ ID NO: 2691 - protein, 36 aa, Plasmodium falciparum
HRTNDIQFDKLCDILINKDPRNVNIVLTGKAFIFLK

SEQ ID NO: 2692 - protein, 37 aa, Plasmodium falciparum
HRTNDIQFDKLCDILINKDPRNVNIVLTGKAFIFLKK

SEQ ID NO: 2693 - protein, 38 aa, Plasmodium falciparum
HRTNDIQFDKLCDILINKDPRNVNIVLTGKAFIFLKKK

SEQ ID NO: 2694 - protein, 34 aa, Plasmodium falciparum
KLCDILINKDPRNVNIVLTGKAFIFLKKKFYSFH

SEQ ID NO: 2695 - protein, 46 aa, Plasmodium falciparum
KLCDILINKDPRNVNIVLTGKAFIFLKKKFYSFHLPYYEECKNIVH

SEQ ID NO: 2696 - protein, 14 aa, Plasmodium falciparum
KAFIFLKKKFYSFH

SEQ ID NO: 2697 - protein, 26 aa, Plasmodium falciparum
KAFIFLKKKFYSFHLPYYEECKNIVH

SEQ ID NO: 2698 - protein, 33 aa, Plasmodium falciparum
KAFIFLKKKFYSFHLPYYEECKNIVHYIMKKKH

SEQ ID NO: 2699 - protein, 43 aa, Plasmodium falciparum
KAFIFLKKKFYSFHLPYYEECKNIVHYIMKKKHKKIKNIINNH

SEQ ID NO: 2700 - protein, 50 aa, Plasmodium falciparum
KAFIFLKKKFYSFHLPYYEECKNIVHYIMKKKHKKIKNIINNHNSNLYYH

SEQ ID NO: 2701 - protein, 17 aa, Plasmodium falciparum
HLPYYEECKNIVHYIMK

SEQ ID NO: 2702 - protein, 18 aa, Plasmodium falciparum
HLPYYEECKNIVHYIMKK

SEQ ID NO: 2703 - protein, 19 aa, Plasmodium falciparum
HLPYYEECKNIVHYIMKKK

SEQ ID NO: 2704 - protein, 24 aa, Plasmodium falciparum
HLPYYEECKNIVHYIMKKKHKKIK

SEQ ID NO: 2705 - protein, 9 aa, Plasmodium falciparum
KNIVHYIMK

SEQ ID NO: 2706 - protein, 10 aa, Plasmodium falciparum
KNIVHYIMKK

SEQ ID NO: 2707 - protein, 11 aa, Plasmodium falciparum
KNIVHYIMKKK

SEQ ID NO: 2708 - protein, 12 aa, Plasmodium falciparum
KNIVHYIMKKKH

SEQ ID NO: 2709 - protein, 22 aa, Plasmodium falciparum
KNIVHYIMKKKHKKIKNIINNH

SEQ ID NO: 2710 - protein, 29 aa, Plasmodium falciparum
KNIVHYIMKKKHKKIKNIINNHNSNLYYH

SEQ ID NO: 2711 - protein, 12 aa, Plasmodium falciparum
HYIMKKKHKKIK

SEQ ID NO: 2712 - protein, 45 aa, Plasmodium falciparum
HYIMKKKHKKIKNIINNHNSNLYYHYNIIDTFVKRMNKEYMCFNK

SEQ ID NO: 2713 - protein, 8 aa, Plasmodium falciparum
KKKHKKIK

SEQ ID NO: 2714 - protein, 14 aa, Plasmodium falciparum
KKKHKKIKNIINNH

SEQ ID NO: 2715 - protein, 21 aa, Plasmodium falciparum
KKKHKKIKNIINNHNSNLYYH

SEQ ID NO: 2716 - protein, 7 aa, Plasmodium falciparum
KKHKKIK

SEQ ID NO: 2717 - protein, 13 aa, Plasmodium falciparum
KKHKKIKNIINNH

SEQ ID NO: 2718 - protein, 20 aa, Plasmodium falciparum
KKHKKIKNIINNHNSNLYYH

SEQ ID NO: 2719 - protein, 38 aa, Plasmodium falciparum
HKKIKNIINNHNSNLYYHYNIIDTFVKRMNKEYMCFNK

SEQ ID NO: 2720 - protein, 46 aa, Plasmodium falciparum
HKKIKNIINNHNSNLYYHYNIIDTFVKRMNKEYMCFNKLLYKIQQK

SEQ ID NO: 2721 - protein, 28 aa, Plasmodium falciparum
HNSNLYYHYNIIDTFVKRMNKEYMCFNK

SEQ ID NO: 2722 - protein, 36 aa, Plasmodium falciparum
HNSNLYYHYNIIDTFVKRMNKEYMCFNKLLYKIQQK

SEQ ID NO: 2723 - protein, 21 aa, Plasmodium falciparum
HYNIIDTFVKRMNKEYMCFNK

SEQ ID NO: 2724 - protein, 29 aa, Plasmodium falciparum
HYNIIDTFVKRMNKEYMCFNKLLYKIQQK

SEQ ID NO: 2725 - protein, 23 aa, Plasmodium falciparum
KEYMCFNKLLYKIQQKLLYNLIH

SEQ ID NO: 2726 - protein, 42 aa, Plasmodium falciparum
KEYMCFNKLLYKIQQKLLYNLIHNLYKKKKYMNNYYDIDEVH

SEQ ID NO: 2727 - protein, 16 aa, Plasmodium falciparum
KLLYKIQQKLLYNLIH

SEQ ID NO: 2728 - protein, 35 aa, Plasmodium falciparum
KLLYKIQQKLLYNLIHNLYKKKKYMNNYYDIDEVH

SEQ ID NO: 2729 - protein, 37 aa, Plasmodium falciparum
HNLYKKKKYMNNYYDIDEVHLIGNNNNNNNKNNSKEK

SEQ ID NO: 2730 - protein, 38 aa, Plasmodium falciparum
HNLYKKKKYMNNYYDIDEVHLIGNNNNNNNKNNSKEKK

SEQ ID NO: 2731 - protein, 42 aa, Plasmodium falciparum
HNLYKKKKYMNNYYDIDEVHLIGNNNNNNNKNNSKEKKLPLK

SEQ ID NO: 2732 - protein, 44 aa, Plasmodium falciparum
HNLYKKKKYMNNYYDIDEVHLIGNNNNNNNKNNSKEKKLPLKNK

SEQ ID NO: 2733 - protein, 46 aa, Plasmodium falciparum
HNLYKKKKYMNNYYDIDEVHLIGNNNNNNNKNNSKEKKLPLKNKMK

SEQ ID NO: 2734 - protein, 50 aa, Plasmodium falciparum
HNLYKKKKYMNNYYDIDEVHLIGNNNNNNNKNNSKEKKLPLKNKMKHIRK

SEQ ID NO: 2735 - protein, 18 aa, Plasmodium falciparum
HLIGNNNNNNNKNNSKEK

SEQ ID NO: 2736 - protein, 19 aa, Plasmodium falciparum
HLIGNNNNNNNKNNSKEKK

SEQ ID NO: 2737 - protein, 23 aa, Plasmodium falciparum
HLIGNNNNNNNKNNSKEKKLPLK

SEQ ID NO: 2738 - protein, 25 aa, Plasmodium falciparum
HLIGNNNNNNNKNNSKEKKLPLKNK

SEQ ID NO: 2739 - protein, 27 aa, Plasmodium falciparum
HLIGNNNNNNNKNNSKEKKLPLKNKMK

SEQ ID NO: 2740 - protein, 31 aa, Plasmodium falciparum
HLIGNNNNNNNKNNSKEKKLPLKNKMKHIRK

SEQ ID NO: 2741 - protein, 17 aa, Plasmodium falciparum
KNNSKEKKLPLKNKMKH

SEQ ID NO: 2742 - protein, 38 aa, Plasmodium falciparum
KNNSKEKKLPLKNKMKHIRKNESNDNITFNTYTSNNIH

SEQ ID NO: 2743 - protein, 46 aa, Plasmodium falciparum
KNNSKEKKLPLKNKMKHIRKNESNDNITFNTYTSNNIHLSKYKYVH

SEQ ID NO: 2744 - protein, 47 aa, Plasmodium falciparum
KNNSKEKKLPLKNKMKHIRKNESNDNITFNTYTSNNIHLSKYKYVHH

SEQ ID NO: 2745 - protein, 13 aa, Plasmodium falciparum
KEKKLPLKNKMKH

SEQ ID NO: 2746 - protein, 34 aa, Plasmodium falciparum
KEKKLPLKNKMKHIRKNESNDNITFNTYTSNNIH

SEQ ID NO: 2747 - protein, 42 aa, Plasmodium falciparum
KEKKLPLKNKMKHIRKNESNDNITFNTYTSNNIHLSKYKYVH

SEQ ID NO: 2748 - protein, 43 aa, Plasmodium falciparum
KEKKLPLKNKMKHIRKNESNDNITFNTYTSNNIHLSKYKYVHH

SEQ ID NO: 2749 - protein, 40 aa, Plasmodium falciparum
KKLPLKNKMKHIRKNESNDNITFNTYTSNNIHLSKYKYVH

SEQ ID NO: 2750 - protein, 41 aa, Plasmodium falciparum
KKLPLKNKMKHIRKNESNDNITFNTYTSNNIHLSKYKYVHH

SEQ ID NO: 2751 - protein, 11 aa, Plasmodium falciparum
KKLPLKNKMKH

SEQ ID NO: 2752 - protein, 32 aa, Plasmodium falciparum
KKLPLKNKMKHIRKNESNDNITFNTYTSNNIH

SEQ ID NO: 2753 - protein, 10 aa, Plasmodium falciparum
KLPLKNKMKH

SEQ ID NO: 2754 - protein, 31 aa, Plasmodium falciparum
KLPLKNKMKHIRKNESNDNITFNTYTSNNIH

SEQ ID NO: 2755 - protein, 39 aa, Plasmodium falciparum
KLPLKNKMKHIRKNESNDNITFNTYTSNNIHLSKYKYVH

SEQ ID NO: 2756 - protein, 40 aa, Plasmodium falciparum
KLPLKNKMKHIRKNESNDNITFNTYTSNNIHLSKYKYVHH

SEQ ID NO: 2757 - protein, 9 aa, Plasmodium falciparum
KNKMKHIRK

SEQ ID NO: 2758 - protein, 27 aa, Plasmodium falciparum
KNKMKHIRKNESNDNITFNTYTSNNIH

SEQ ID NO: 2759 - protein, 35 aa, Plasmodium falciparum
KNKMKHIRKNESNDNITFNTYTSNNIHLSKYKYVH

SEQ ID NO: 2760 - protein, 36 aa, Plasmodium falciparum
KNKMKHIRKNESNDNITFNTYTSNNIHLSKYKYVHH

SEQ ID NO: 2761 - protein, 7 aa, Plasmodium falciparum
KMKHIRK

SEQ ID NO: 2762 - protein, 25 aa, Plasmodium falciparum
KMKHIRKNESNDNITFNTYTSNNIH

SEQ ID NO: 2763 - protein, 33 aa, Plasmodium falciparum
KMKHIRKNESNDNITFNTYTSNNIHLSKYKYVH

SEQ ID NO: 2764 - protein, 34 aa, Plasmodium falciparum
KMKHIRKNESNDNITFNTYTSNNIHLSKYKYVHH

SEQ ID NO: 2765 - protein, 32 aa, Plasmodium falciparum
HIRKNESNDNITFNTYTSNNIHLSKYKYVHHK

SEQ ID NO: 2766 - protein, 11 aa, Plasmodium falciparum
HLSKYKYVHHK

SEQ ID NO: 2767 - protein, 34 aa, Plasmodium falciparum
HLSKYKYVHHKNYYYPDSCTNLRKKKNSLFYNLK

SEQ ID NO: 2768 - protein, 35 aa, Plasmodium falciparum
HLSKYKYVHHKNYYYPDSCTNLRKKKNSLFYNLKK

SEQ ID NO: 2769 - protein, 41 aa, Plasmodium falciparum
HLSKYKYVHHKNYYYPDSCTNLRKKKNSLFYNLKKYIYYEK

SEQ ID NO: 2770 - protein, 42 aa, Plasmodium falciparum
HLSKYKYVHHKNYYYPDSCTNLRKKKNSLFYNLKKYIYYEKK

SEQ ID NO: 2771 - protein, 43 aa, Plasmodium falciparum
HLSKYKYVHHKNYYYPDSCTNLRKKKNSLFYNLKKYIYYEKKK

SEQ ID NO: 2772 - protein, 51 aa, Plasmodium falciparum
HLSKYKYVHHKNYYYPDSCTNLRKKKNSLFYNLKKYIYYEKKKYLQHCLLK

SEQ ID NO: 2773 - protein, 8 aa, Plasmodium falciparum
KYKYVHHK

SEQ ID NO: 2774 - protein, 44 aa, Plasmodium falciparum
KYKYVHHKNYYYPDSCTNLRKKKNSLFYNLKKYIYYEKKKYLQH

SEQ ID NO: 2775 - protein, 49 aa, Plasmodium falciparum
KYKYVHHKNYYYPDSCTNLRKKKNSLFYNLKKYIYYEKKKYLQHCLLKH

SEQ ID NO: 2776 - protein, 26 aa, Plasmodium falciparum
HHKNYYYPDSCTNLRKKKNSLFYNLK

SEQ ID NO: 2777 - protein, 27 aa, Plasmodium falciparum
HHKNYYYPDSCTNLRKKKNSLFYNLKK

SEQ ID NO: 2778 - protein, 33 aa, Plasmodium falciparum
HHKNYYYPDSCTNLRKKKNSLFYNLKKYIYYEK

SEQ ID NO: 2779 - protein, 34 aa, Plasmodium falciparum
HHKNYYYPDSCTNLRKKKNSLFYNLKKYIYYEKK

SEQ ID NO: 2780 - protein, 35 aa, Plasmodium falciparum
HHKNYYYPDSCTNLRKKKNSLFYNLKKYIYYEKKK

SEQ ID NO: 2781 - protein, 43 aa, Plasmodium falciparum
HHKNYYYPDSCTNLRKKKNSLFYNLKKYIYYEKKKYLQHCLLK

SEQ ID NO: 2782 - protein, 49 aa, Plasmodium falciparum
HHKNYYYPDSCTNLRKKKNSLFYNLKKYIYYEKKKYLQHCLLKHDNYKK

SEQ ID NO: 2783 - protein, 25 aa, Plasmodium falciparum
HKNYYYPDSCTNLRKKKNSLFYNLK

SEQ ID NO: 2784 - protein, 26 aa, Plasmodium falciparum
HKNYYYPDSCTNLRKKKNSLFYNLKK

SEQ ID NO: 2785 - protein, 32 aa, Plasmodium falciparum
HKNYYYPDSCTNLRKKKNSLFYNLKKYIYYEK

SEQ ID NO: 2786 - protein, 33 aa, Plasmodium falciparum
HKNYYYPDSCTNLRKKKNSLFYNLKKYIYYEKK

SEQ ID NO: 2787 - protein, 34 aa, Plasmodium falciparum
HKNYYYPDSCTNLRKKKNSLFYNLKKYIYYEKKK

SEQ ID NO: 2788 - protein, 42 aa, Plasmodium falciparum
HKNYYYPDSCTNLRKKKNSLFYNLKKYIYYEKKKYLQHCLLK

SEQ ID NO: 2789 - protein, 48 aa, Plasmodium falciparum
HKNYYYPDSCTNLRKKKNSLFYNLKKYIYYEKKKYLQHCLLKHDNYKK

SEQ ID NO: 2790 - protein, 24 aa, Plasmodium falciparum
KKKNSLFYNLKKYIYYEKKKYLQH

SEQ ID NO: 2791 - protein, 29 aa, Plasmodium falciparum
KKKNSLFYNLKKYIYYEKKKYLQHCLLKH

SEQ ID NO: 2792 - protein, 23 aa, Plasmodium falciparum
KKNSLFYNLKKYIYYEKKKYLQH

SEQ ID NO: 2793 - protein, 28 aa, Plasmodium falciparum
KKNSLFYNLKKYIYYEKKKYLQHCLLKH

SEQ ID NO: 2794 - protein, 22 aa, Plasmodium falciparum
KNSLFYNLKKYIYYEKKKYLQH

SEQ ID NO: 2795 - protein, 27 aa, Plasmodium falciparum
KNSLFYNLKKYIYYEKKKYLQHCLLKH

SEQ ID NO: 2796 - protein, 14 aa, Plasmodium falciparum
KKYIYYEKKKYLQH

SEQ ID NO: 2797 - protein, 19 aa, Plasmodium falciparum
KKYIYYEKKKYLQHCLLKH

SEQ ID NO: 2798 - protein, 49 aa, Plasmodium falciparum
KKYIYYEKKKYLQHCLLKHDNYKKVELPRIKDINYSYQMESIKTRNFIH

SEQ ID NO: 2799 - protein, 13 aa, Plasmodium falciparum
KYIYYEKKKYLQH

SEQ ID NO: 2800 - protein, 18 aa, Plasmodium falciparum
KYIYYEKKKYLQHCLLKH

SEQ ID NO: 2801 - protein, 48 aa, Plasmodium falciparum
KYIYYEKKKYLQHCLLKHDNYKKVELPRIKDINYSYQMESIKTRNFIH

SEQ ID NO: 2802 - protein, 11 aa, Plasmodium falciparum
KKKYLQHCLLK

SEQ ID NO: 2803 - protein, 12 aa, Plasmodium falciparum
KKKYLQHCLLKH

SEQ ID NO: 2804 - protein, 42 aa, Plasmodium falciparum
KKKYLQHCLLKHDNYKKVELPRIKDINYSYQMESIKTRNFIH

SEQ ID NO: 2805 - protein, 10 aa, Plasmodium falciparum
KKYLQHCLLK

SEQ ID NO: 2806 - protein, 11 aa, Plasmodium falciparum
KKYLQHCLLKH

SEQ ID NO: 2807 - protein, 41 aa, Plasmodium falciparum
KKYLQHCLLKHDNYKKVELPRIKDINYSYQMESIKTRNFIH

SEQ ID NO: 2808 - protein, 9 aa, Plasmodium falciparum
KYLQHCLLK

SEQ ID NO: 2809 - protein, 10 aa, Plasmodium falciparum
KYLQHCLLKH

SEQ ID NO: 2810 - protein, 40 aa, Plasmodium falciparum
KYLQHCLLKHDNYKKVELPRIKDINYSYQMESIKTRNFIH

SEQ ID NO: 2811 - protein, 11 aa, Plasmodium falciparum
HCLLKHDNYKK

SEQ ID NO: 2812 - protein, 18 aa, Plasmodium falciparum
HCLLKHDNYKKVELPRIK

SEQ ID NO: 2813 - protein, 7 aa, Plasmodium falciparum
KHDNYKK

SEQ ID NO: 2814 - protein, 32 aa, Plasmodium falciparum
KHDNYKKVELPRIKDINYSYQMESIKTRNFIH

SEQ ID NO: 2815 - protein, 13 aa, Plasmodium falciparum
HDNYKKVELPRIK

SEQ ID NO: 2816 - protein, 27 aa, Plasmodium falciparum
KKVELPRIKDINYSYQMESIKTRNFIH

SEQ ID NO: 2817 - protein, 26 aa, Plasmodium falciparum
KVELPRIKDINYSYQMESIKTRNFIH

SEQ ID NO: 2818 - protein, 29 aa, Plasmodium falciparum
HSLSEQFAFSNLILSFYIIKNDDNNVYNK

SEQ ID NO: 2819 - protein, 35 aa, Plasmodium falciparum
HSLSEQFAFSNLILSFYIIKNDDNNVYNKNYIYNK

SEQ ID NO: 2820 - protein, 41 aa, Plasmodium falciparum
HSLSEQFAFSNLILSFYIIKNDDNNVYNKNYIYNKNYIYNK

SEQ ID NO: 2821 - protein, 47 aa, Plasmodium falciparum
HSLSEQFAFSNLILSFYIIKNDDNNVYNKNYIYNKNYIYNKNSICNK

SEQ ID NO: 2822 - protein, 49 aa, Plasmodium falciparum
KNYIYNKNYIYNKNSICNKNYICNKNYIYNKNNIYNKNNIYNKKNILTH

SEQ ID NO: 2823 - protein, 43 aa, Plasmodium falciparum
KNYIYNKNSICNKNYICNKNYIYNKNNIYNKNNIYNKKNILTH

SEQ ID NO: 2824 - protein, 37 aa, Plasmodium falciparum
KNSICNKNYICNKNYIYNKNNIYNKNNIYNKKNILTH

SEQ ID NO: 2825 - protein, 31 aa, Plasmodium falciparum
KNYICNKNYIYNKNNIYNKNNIYNKKNILTH

SEQ ID NO: 2826 - protein, 25 aa, Plasmodium falciparum
KNYIYNKNNIYNKNNIYNKKNILTH

SEQ ID NO: 2827 - protein, 49 aa, Plasmodium falciparum
KNYIYNKNNIYNKNNIYNKKNILTHAKSVLLSGSSKKFLKFFSNIIRRH

SEQ ID NO: 2828 - protein, 19 aa, Plasmodium falciparum
KNNIYNKNNIYNKKNILTH

SEQ ID NO: 2829 - protein, 43 aa, Plasmodium falciparum
KNNIYNKNNIYNKKNILTHAKSVLLSGSSKKFLKFFSNIIRRH

SEQ ID NO: 2830 - protein, 13 aa, Plasmodium falciparum
KNNIYNKKNILTH

SEQ ID NO: 2831 - protein, 37 aa, Plasmodium falciparum
KNNIYNKKNILTHAKSVLLSGSSKKFLKFFSNIIRRH

SEQ ID NO: 2832 - protein, 9 aa, Plasmodium falciparum
KKNILTHAK

SEQ ID NO: 2833 - protein, 31 aa, Plasmodium falciparum
KKNILTHAKSVLLSGSSKKFLKFFSNIIRRH

SEQ ID NO: 2834 - protein, 49 aa, Plasmodium falciparum
KKNILTHAKSVLLSGSSKKFLKFFSNIIRRHKLKEKKNKKNIKRYKMNH

SEQ ID NO: 2835 - protein, 8 aa, Plasmodium falciparum
KNILTHAK

SEQ ID NO: 2836 - protein, 30 aa, Plasmodium falciparum
KNILTHAKSVLLSGSSKKFLKFFSNIIRRH

SEQ ID NO: 2837 - protein, 48 aa, Plasmodium falciparum
KNILTHAKSVLLSGSSKKFLKFFSNIIRRHKLKEKKNKKNIKRYKMNH

SEQ ID NO: 2838 - protein, 12 aa, Plasmodium falciparum
HAKSVLLSGSSK

SEQ ID NO: 2839 - protein, 13 aa, Plasmodium falciparum
HAKSVLLSGSSKK

SEQ ID NO: 2840 - protein, 26 aa, Plasmodium falciparum
HAKSVLLSGSSKKFLKFFSNIIRRHK

SEQ ID NO: 2841 - protein, 33 aa, Plasmodium falciparum
HAKSVLLSGSSKKFLKFFSNIIRRHKLKEKKNK

SEQ ID NO: 2842 - protein, 34 aa, Plasmodium falciparum
HAKSVLLSGSSKKFLKFFSNIIRRHKLKEKKNKK

SEQ ID NO: 2843 - protein, 37 aa, Plasmodium falciparum
HAKSVLLSGSSKKFLKFFSNIIRRHKLKEKKNKKNIK

SEQ ID NO: 2844 - protein, 40 aa, Plasmodium falciparum
HAKSVLLSGSSKKFLKFFSNIIRRHKLKEKKNKKNIKRYK

SEQ ID NO: 2845 - protein, 49 aa, Plasmodium falciparum
HAKSVLLSGSSKKFLKFFSNIIRRHKLKEKKNKKNIKRYKMNHVNNTSK

SEQ ID NO: 2846 - protein, 23 aa, Plasmodium falciparum
KSVLLSGSSKKFLKFFSNIIRRH

SEQ ID NO: 2847 - protein, 41 aa, Plasmodium falciparum
KSVLLSGSSKKFLKFFSNIIRRHKLKEKKNKKNIKRYKMNH

SEQ ID NO: 2848 - protein, 49 aa, Plasmodium falciparum
KSVLLSGSSKKFLKFFSNIIRRHKLKEKKNKKNIKRYKMNHVNNTSKGH

SEQ ID NO: 2849 - protein, 11 aa, Plasmodium falciparum
KFFSNIIRRHK

SEQ ID NO: 2850 - protein, 28 aa, Plasmodium falciparum
KFFSNIIRRHKLKEKKNKKNIKRYKMNH

SEQ ID NO: 2851 - protein, 36 aa, Plasmodium falciparum
KFFSNIIRRHKLKEKKNKKNIKRYKMNHVNNTSKGH

SEQ ID NO: 2852 - protein, 44 aa, Plasmodium falciparum
KFFSNIIRRHKLKEKKNKKNIKRYKMNHVNNTSKGHIILNMCTH

SEQ ID NO: 2853 - protein, 9 aa, Plasmodium falciparum
HKLKEKKNK

SEQ ID NO: 2854 - protein, 10 aa, Plasmodium falciparum
HKLKEKKNKK

SEQ ID NO: 2855 - protein, 13 aa, Plasmodium falciparum
HKLKEKKNKKNIK

SEQ ID NO: 2856 - protein, 16 aa, Plasmodium falciparum
HKLKEKKNKKNIKRYK

SEQ ID NO: 2857 - protein, 25 aa, Plasmodium falciparum
HKLKEKKNKKNIKRYKMNHVNNTSK

SEQ ID NO: 2858 - protein, 45 aa, Plasmodium falciparum
HKLKEKKNKKNIKRYKMNHVNNTSKGHIILNMCTHGFKKDYSSLK

SEQ ID NO: 2859 - protein, 47 aa, Plasmodium falciparum
HKLKEKKNKKNIKRYKMNHVNNTSKGHIILNMCTHGFKKDYSSLKNK

SEQ ID NO: 2860 - protein, 18 aa, Plasmodium falciparum
KLKEKKNKKNIKRYKMNH

SEQ ID NO: 2861 - protein, 26 aa, Plasmodium falciparum
KLKEKKNKKNIKRYKMNHVNNTSKGH

SEQ ID NO: 2862 - protein, 34 aa, Plasmodium falciparum
KLKEKKNKKNIKRYKMNHVNNTSKGHIILNMCTH

SEQ ID NO: 2863 - protein, 16 aa, Plasmodium falciparum
KEKKNKKNIKRYKMNH

SEQ ID NO: 2864 - protein, 24 aa, Plasmodium falciparum
KEKKNKKNIKRYKMNHVNNTSKGH

SEQ ID NO: 2865 - protein, 32 aa, Plasmodium falciparum
KEKKNKKNIKRYKMNHVNNTSKGHIILNMCTH

SEQ ID NO: 2866 - protein, 14 aa, Plasmodium falciparum
KKNKKNIKRYKMNH

SEQ ID NO: 2867 - protein, 22 aa, Plasmodium falciparum
KKNKKNIKRYKMNHVNNTSKGH

SEQ ID NO: 2868 - protein, 30 aa, Plasmodium falciparum
KKNKKNIKRYKMNHVNNTSKGHIILNMCTH

SEQ ID NO: 2869 - protein, 13 aa, Plasmodium falciparum
KNKKNIKRYKMNH

SEQ ID NO: 2870 - protein, 21 aa, Plasmodium falciparum
KNKKNIKRYKMNHVNNTSKGH

SEQ ID NO: 2871 - protein, 29 aa, Plasmodium falciparum
KNKKNIKRYKMNHVNNTSKGHIILNMCTH

SEQ ID NO: 2872 - protein, 11 aa, Plasmodium falciparum
KKNIKRYKMNH

SEQ ID NO: 2873 - protein, 19 aa, Plasmodium falciparum
KKNIKRYKMNHVNNTSKGH

SEQ ID NO: 2874 - protein, 27 aa, Plasmodium falciparum
KKNIKRYKMNHVNNTSKGHIILNMCTH

SEQ ID NO: 2875 - protein, 10 aa, Plasmodium falciparum
KNIKRYKMNH

SEQ ID NO: 2876 - protein, 18 aa, Plasmodium falciparum
KNIKRYKMNHVNNTSKGH

SEQ ID NO: 2877 - protein, 26 aa, Plasmodium falciparum
KNIKRYKMNHVNNTSKGHIILNMCTH

SEQ ID NO: 2878 - protein, 10 aa, Plasmodium falciparum
KMNHVNNTSK

SEQ ID NO: 2879 - protein, 12 aa, Plasmodium falciparum
KMNHVNNTSKGH

SEQ ID NO: 2880 - protein, 20 aa, Plasmodium falciparum
KMNHVNNTSKGHIILNMCTH

SEQ ID NO: 2881 - protein, 27 aa, Plasmodium falciparum
HVNNTSKGHIILNMCTHGFKKDYSSLK

SEQ ID NO: 2882 - protein, 29 aa, Plasmodium falciparum
HVNNTSKGHIILNMCTHGFKKDYSSLKNK

SEQ ID NO: 2883 - protein, 36 aa, Plasmodium falciparum
HVNNTSKGHIILNMCTHGFKKDYSSLKNKYRIVNNK

SEQ ID NO: 2884 - protein, 19 aa, Plasmodium falciparum
HIILNMCTHGFKKDYSSLK

SEQ ID NO: 2885 - protein, 21 aa, Plasmodium falciparum
HIILNMCTHGFKKDYSSLKNK

SEQ ID NO: 2886 - protein, 28 aa, Plasmodium falciparum
HIILNMCTHGFKKDYSSLKNKYRIVNNK

SEQ ID NO: 2887 - protein, 11 aa, Plasmodium falciparum
HGFKKDYSSLK

SEQ ID NO: 2888 - protein, 13 aa, Plasmodium falciparum
HGFKKDYSSLKNK

SEQ ID NO: 2889 - protein, 20 aa, Plasmodium falciparum
HGFKKDYSSLKNKYRIVNNK

SEQ ID NO: 2890 - protein, 30 aa, Plasmodium falciparum
KKDYSSLKNKYRIVNNKRYMLKNDNVYDRH

SEQ ID NO: 2891 - protein, 29 aa, Plasmodium falciparum
KDYSSLKNKYRIVNNKRYMLKNDNVYDRH

SEQ ID NO: 2892 - protein, 23 aa, Plasmodium falciparum
KNKYRIVNNKRYMLKNDNVYDRH

SEQ ID NO: 2893 - protein, 21 aa, Plasmodium falciparum
KYRIVNNKRYMLKNDNVYDRH

SEQ ID NO: 2894 - protein, 14 aa, Plasmodium falciparum
HLLVDKCKRNICHK

SEQ ID NO: 2895 - protein, 22 aa, Plasmodium falciparum
HLLVDKCKRNICHKYTDIKNIK

SEQ ID NO: 2896 - protein, 9 aa, Plasmodium falciparum
KCKRNICHK

SEQ ID NO: 2897 - protein, 7 aa, Plasmodium falciparum
KRNICHK

SEQ ID NO: 2898 - protein, 10 aa, Plasmodium falciparum
HKYTDIKNIK

SEQ ID NO: 2899 - protein, 40 aa, Plasmodium falciparum
HKYTDIKNIKLSIYEYILRTCTVYARMKPKDKSDLILSLK

SEQ ID NO: 2900 - protein, 41 aa, Plasmodium falciparum
HKYTDIKNIKLSIYEYILRTCTVYARMKPKDKSDLILSLKK

SEQ ID NO: 2901 - protein, 147 aa, Mycobacterium mucogenicum
LHHSKHHATYVKGANDAVAKLEEARAKEDHSAILLNEKNLAFNLAGHVNHTIWWKNLSPNGGDKPTGELAAAIADAFGSFDKFRAQFHAAATTVQGSGWAALGWDTLGNKLLIFQVYDHQTNFPLGIVPLLLLDMWEHAFYLQYKNV

SEQ ID NO: 2902 - protein, 26 aa, Mycobacterium mucogenicum
HHSKHHATYVKGANDAVAKLEEARAK

SEQ ID NO: 2903 - protein, 11 aa, Mycobacterium mucogenicum
HHSKHHATYVK

SEQ ID NO: 2904 - protein, 19 aa, Mycobacterium mucogenicum
HHSKHHATYVKGANDAVAK

SEQ ID NO: 2905 - protein, 18 aa, Mycobacterium mucogenicum
HSKHHATYVKGANDAVAK

SEQ ID NO: 2906 - protein, 25 aa, Mycobacterium mucogenicum
HSKHHATYVKGANDAVAKLEEARAK

SEQ ID NO: 2907 - protein, 10 aa, Mycobacterium mucogenicum
HSKHHATYVK

SEQ ID NO: 2908 - protein, 46 aa, Mycobacterium mucogenicum
KHHATYVKGANDAVAKLEEARAKEDHSAILLNEKNLAFNLAGHVNH

SEQ ID NO: 2909 - protein, 8 aa, Mycobacterium mucogenicum
KHHATYVK

SEQ ID NO: 2910 - protein, 43 aa, Mycobacterium mucogenicum
KHHATYVKGANDAVAKLEEARAKEDHSAILLNEKNLAFNLAGH

SEQ ID NO: 2911 - protein, 26 aa, Mycobacterium mucogenicum
KHHATYVKGANDAVAKLEEARAKEDH

SEQ ID NO: 2912 - protein, 22 aa, Mycobacterium mucogenicum
HHATYVKGANDAVAKLEEARAK

SEQ ID NO: 2913 - protein, 15 aa, Mycobacterium mucogenicum
HHATYVKGANDAVAK

SEQ ID NO: 2914 - protein, 14 aa, Mycobacterium mucogenicum
HATYVKGANDAVAK

SEQ ID NO: 2915 - protein, 21 aa, Mycobacterium mucogenicum
HATYVKGANDAVAKLEEARAK

SEQ ID NO: 2916 - protein, 36 aa, Mycobacterium mucogenicum
KGANDAVAKLEEARAKEDHSAILLNEKNLAFNLAGH

SEQ ID NO: 2917 - protein, 19 aa, Mycobacterium mucogenicum
KGANDAVAKLEEARAKEDH

SEQ ID NO: 2918 - protein, 39 aa, Mycobacterium mucogenicum
KGANDAVAKLEEARAKEDHSAILLNEKNLAFNLAGHVNH

SEQ ID NO: 2919 - protein, 28 aa, Mycobacterium mucogenicum
KLEEARAKEDHSAILLNEKNLAFNLAGH

SEQ ID NO: 2920 - protein, 11 aa, Mycobacterium mucogenicum
KLEEARAKEDH

SEQ ID NO: 2921 - protein, 31 aa, Mycobacterium mucogenicum
KLEEARAKEDHSAILLNEKNLAFNLAGHVNH

SEQ ID NO: 2922 - protein, 35 aa, Mycobacterium mucogenicum
HSAILLNEKNLAFNLAGHVNHTIWWKNLSPNGGDK

SEQ ID NO: 2923 - protein, 18 aa, Mycobacterium mucogenicum
HVNHTIWWKNLSPNGGDK

SEQ ID NO: 2924 - protein, 15 aa, Mycobacterium mucogenicum
HTIWWKNLSPNGGDK

SEQ ID NO: 2925 - protein, 34 aa, Mycobacterium mucogenicum
KNLSPNGGDKPTGELAAAIADAFGSFDKFRAQFH

SEQ ID NO: 2926 - protein, 1984 aa, Plasmodium falciparum; identical to SEQ ID NO: 2545

SEQ ID NO: 2927 - protein, 38 aa, Plasmodium falciparum; identical to SEQ ID NO: 2546

SEQ ID NO: 2928 - protein, 17 aa, Plasmodium falciparum
HLMCTGLRNEKLINDRK

SEQ ID NO: 2929 - protein, 38 aa, Plasmodium falciparum; identical to SEQ ID NO: 2548

SEQ ID NO: 2930 - protein, 35 aa, Plasmodium falciparum; identical to SEQ ID NO: 2549

SEQ ID NO: 2931 - protein, 25 aa, Plasmodium falciparum
HKERLPFEGNAIINKNNKYDSNDEK

SEQ ID NO: 2932 - protein, 21 aa, Plasmodium falciparum
KNNKYDSNDEKDDYLRIYNNH

SEQ ID NO: 2933 - protein, 31 aa, Plasmodium falciparum; identical to SEQ ID NO: 2552

SEQ ID NO: 2934 - protein, 49 aa, Plasmodium falciparum; identical to SEQ ID NO: 2553

SEQ ID NO: 2935 - protein, 18 aa, Plasmodium falciparum
KYDSNDEKDDYLRIYNNH

SEQ ID NO: 2936 - protein, 28 aa, Plasmodium falciparum
KYDSNDEKDDYLRIYNNHASINMIKRNH

SEQ ID NO: 2937 - protein, 46 aa, Plasmodium falciparum; identical to SEQ ID NO: 2556

SEQ ID NO: 2938 - protein, 25 aa, Plasmodium falciparum
HASINMIKRNHLIEETLGKKDREYK

SEQ ID NO: 2939 - protein, 15 aa, Plasmodium falciparum
HLIEETLGKKDREYK

SEQ ID NO: 2940 - protein, 11 aa, Plasmodium falciparum
KKDREYKSNTH

SEQ ID NO: 2941 - protein, 30 aa, Plasmodium falciparum; identical to SEQ ID NO: 2560

SEQ ID NO: 2942 - protein, 35 aa, Plasmodium falciparum; identical to SEQ ID NO: 2561

SEQ ID NO: 2943 - protein, 47 aa, Plasmodium falciparum; identical to SEQ ID NO: 2562

SEQ ID NO: 2944 - protein, 16 aa, Plasmodium falciparum
HMKNNKMDYNNNNNNK

SEQ ID NO: 2945 - protein, 28 aa, Plasmodium falciparum
HMKNNKMDYNNNNNNKKKKKINNLNFVK

SEQ ID NO: 2946 - protein, 40 aa, Plasmodium falciparum; identical to SEQ ID NO: 2565

SEQ ID NO: 2947 - protein, 39 aa, Plasmodium falciparum; identical to SEQ ID NO: 2566

SEQ ID NO: 2948 - protein, 38 aa, Plasmodium falciparum; identical to SEQ ID NO: 2567

SEQ ID NO: 2949 - protein, 23 aa, Plasmodium falciparum
HKFNQRNINYYNKDTNNLEYNNK

SEQ ID NO: 2950 - protein, 33 aa, Plasmodium falciparum; identical to SEQ ID NO: 2569

SEQ ID NO: 2951 - protein, 41 aa, Plasmodium falciparum; identical to SEQ ID NO: 2570

SEQ ID NO: 2952 - protein, 43 aa, Plasmodium falciparum; identical to SEQ ID NO: 2571

SEQ ID NO: 2953 - protein, 12 aa, Plasmodium falciparum
KDTNNLEYNNKH

SEQ ID NO: 2954 - protein, 11 aa, Plasmodium falciparum
KHRYIYDCLLK

SEQ ID NO: 2955 - protein, 18 aa, Plasmodium falciparum
HRYIYDCLLKKVEAISQK

SEQ ID NO: 2956 - protein, 20 aa, Plasmodium falciparum
HRYIYDCLLKKVEAISQKNK

SEQ ID NO: 2957 - protein, 30 aa, Plasmodium falciparum; identical to SEQ ID NO: 2576

SEQ ID NO: 2958 - protein, 35 aa, Plasmodium falciparum; identical to SEQ ID NO: 2577

SEQ ID NO: 2959 - protein, 18 aa, Plasmodium falciparum
KTGFITTKGKIVNNILYH

SEQ ID NO: 2960 - protein, 10 aa, Plasmodium falciparum
KIVNNILYHK

SEQ ID NO: 2961 - protein, 11 aa, Plasmodium falciparum
KIVNNILYHKK

SEQ ID NO: 2962 - protein, 51 aa, Plasmodium falciparum; identical to SEQ ID NO: 2581

SEQ ID NO: 2963 - protein, 14 aa, Plasmodium falciparum
HKKKELNLINDSYK

SEQ ID NO: 2964 - protein, 46 aa, Plasmodium falciparum; identical to SEQ ID NO: 2583

SEQ ID NO: 2965 - protein, 11 aa, Plasmodium falciparum
KFSISCLCPHK

SEQ ID NO: 2966 - protein, 48 aa, Plasmodium falciparum; identical to SEQ ID NO: 2585

SEQ ID NO: 2967 - protein, 11 aa, Plasmodium falciparum
KNMLSDFIHIK

SEQ ID NO: 2968 - protein, 20 aa, Plasmodium falciparum
KNMLSDFIHIKEMNTESYIH

SEQ ID NO: 2969 - protein, 28 aa, Plasmodium falciparum
KNMLSDFIHIKEMNTESYIHSKDDNMIH

SEQ ID NO: 2970 - protein, 47 aa, Plasmodium falciparum; identical to SEQ ID NO: 2589

SEQ ID NO: 2971 - protein, 22 aa, Plasmodium falciparum
HIKEMNTESYIHSKDDNMIHNK

SEQ ID NO: 2972 - protein, 32 aa, Plasmodium falciparum; identical to SEQ ID NO: 2591

SEQ ID NO: 2973 - protein, 49 aa, Plasmodium falciparum; identical to SEQ ID NO: 2592

SEQ ID NO: 2974 - protein, 43 aa, Plasmodium falciparum; identical to SEQ ID NO: 2593

SEQ ID NO: 2975 - protein, 44 aa, Plasmodium falciparum; identical to SEQ ID NO: 2594

SEQ ID NO: 2976 - protein, 45 aa, Plasmodium falciparum; identical to SEQ ID NO: 2595

SEQ ID NO: 2977 - protein, 11 aa, Plasmodium falciparum
HSKDDNMIHNK

SEQ ID NO: 2978 - protein, 21 aa, Plasmodium falciparum
HSKDDNMIHNKNSIISEYYIK

SEQ ID NO: 2979 - protein, 38 aa, Plasmodium falciparum; identical to SEQ ID NO: 2598

SEQ ID NO: 2980 - protein, 32 aa, Plasmodium falciparum; identical to SEQ ID NO: 2599

SEQ ID NO: 2981 - protein, 33 aa, Plasmodium falciparum; identical to SEQ ID NO: 2600

SEQ ID NO: 2982 - protein, 34 aa, Plasmodium falciparum; identical to SEQ ID NO: 2601

SEQ ID NO: 2983 - protein, 9 aa, Plasmodium falciparum
KDDNMIHNK

SEQ ID NO: 2984 - protein, 26 aa, Plasmodium falciparum
KDDNMIHNKNSIISEYYIKDNMKNLH

SEQ ID NO: 2985 - protein, 13 aa, Plasmodium falciparum
HNKNSIISEYYIK

SEQ ID NO: 2986 - protein, 30 aa, Plasmodium falciparum; identical to SEQ ID NO: 2605

SEQ ID NO: 2987 - protein, 24 aa, Plasmodium falciparum
HNKNSIISEYYIKDNMKNLHTSSK

SEQ ID NO: 2988 - protein, 25 aa, Plasmodium falciparum
HNKNSIISEYYIKDNMKNLHTSSKK

SEQ ID NO: 2989 - protein, 26 aa, Plasmodium falciparum
HNKNSIISEYYIKDNMKNLHTSSKKK

SEQ ID NO: 2990 - protein, 51 aa, Plasmodium falciparum; identical to SEQ ID NO: 2609

SEQ ID NO: 2991 - protein, 18 aa, Plasmodium falciparum
KNSIISEYYIKDNMKNLH

SEQ ID NO: 2992 - protein, 46 aa, Plasmodium falciparum; identical to SEQ ID NO: 2611

SEQ ID NO: 2993 - protein, 8 aa, Plasmodium falciparum
KNLHTSSK

SEQ ID NO: 2994 - protein, 9 aa, Plasmodium falciparum
KNLHTSSKK

SEQ ID NO: 2995 - protein, 10 aa, Plasmodium falciparum
KNLHTSSKKK

SEQ ID NO: 2996 - protein, 32 aa, Plasmodium falciparum; identical to SEQ ID NO: 2615

SEQ ID NO: 2997 - protein, 11 aa, Plasmodium falciparum
HTSSKKKSITK

SEQ ID NO: 2998 - protein, 32 aa, Plasmodium falciparum; identical to SEQ ID NO: 2617

SEQ ID NO: 2999 - protein, 34 aa, Plasmodium falciparum; identical to SEQ ID NO: 2618

SEQ ID NO: 3000 - protein, 35 aa, Plasmodium falciparum; identical to SEQ ID NO: 2619

SEQ ID NO: 3001 - protein, 36 aa, Plasmodium falciparum; identical to SEQ ID NO: 2620

SEQ ID NO: 3002 - protein, 25 aa, Plasmodium falciparum
KKKSITKERSNFLVQTIKSCLLKDH

SEQ ID NO: 3003 - protein, 45 aa, Plasmodium falciparum; identical to SEQ ID NO: 2622

SEQ ID NO: 3004 - protein, 11 aa, Plasmodium falciparum
KSCLLKDHYIK

SEQ ID NO: 3005 - protein, 28 aa, Plasmodium falciparum
KSCLLKDHYIKEKKKEYYTNNTYCNDLH

SEQ ID NO: 3006 - protein, 8 aa, Plasmodium falciparum
KDHYIKEK

SEQ ID NO: 3007 - protein, 9 aa, Plasmodium falciparum
KDHYIKEKK

SEQ ID NO: 3008 - protein, 10 aa, Plasmodium falciparum
KDHYIKEKKK

SEQ ID NO: 3009 - protein, 23 aa, Plasmodium falciparum
KDHYIKEKKKEYYTNNTYCNDLH

SEQ ID NO: 3010 - protein, 50 aa, Plasmodium falciparum; identical to SEQ ID NO: 2629

SEQ ID NO: 3011 - protein, 42 aa, Plasmodium falciparum; identical to SEQ ID NO: 2630

SEQ ID NO: 3012 - protein, 48 aa, Plasmodium falciparum; identical to SEQ ID NO: 2631

SEQ ID NO: 3013 - protein, 51 aa, Plasmodium falciparum; identical to SEQ ID NO: 2632

SEQ ID NO: 3014 - protein, 15 aa, Plasmodium falciparum
HLCDINKKNMDINSK

SEQ ID NO: 3015 - protein, 21 aa, Plasmodium falciparum
HLCDINKKNMDINSKNELMGK

SEQ ID NO: 3016 - protein, 24 aa, Plasmodium falciparum
HLCDINKKNMDINSKNELMGKYSK

SEQ ID NO: 3017 - protein, 39 aa, Plasmodium falciparum; identical to SEQ ID NO: 2636

SEQ ID NO: 3018 - protein, 30 aa, Plasmodium falciparum; identical to SEQ ID NO: 2637

SEQ ID NO: 3019 - protein, 42 aa, Plasmodium falciparum; identical to SEQ ID NO: 2638

SEQ ID NO: 3020 - protein, 33 aa, Plasmodium falciparum; identical to SEQ ID NO: 2639

SEQ ID NO: 3021 - protein, 48 aa, Plasmodium falciparum; identical to SEQ ID NO: 2640

SEQ ID NO: 3022 - protein, 51 aa, Plasmodium falciparum; identical to SEQ ID NO: 2641

SEQ ID NO: 3023 - protein, 51 aa, Plasmodium falciparum; identical to SEQ ID NO: 2642

SEQ ID NO: 3024 - protein, 48 aa, Plasmodium falciparum; identical to SEQ ID NO: 2643

SEQ ID NO: 3025 - protein, 42 aa, Plasmodium falciparum; identical to SEQ ID NO: 2644

SEQ ID NO: 3026 - protein, 39 aa, Plasmodium falciparum; identical to SEQ ID NO: 2645

SEQ ID NO: 3027 - protein, 33 aa, Plasmodium falciparum; identical to SEQ ID NO: 2646

SEQ ID NO: 3028 - protein, 30 aa, Plasmodium falciparum; identical to SEQ ID NO: 2647

SEQ ID NO: 3029 - protein, 24 aa, Plasmodium falciparum
KYSKNELMGKTIKNQVGVDTNIYH

SEQ ID NO: 3030 - protein, 49 aa, Plasmodium falciparum; identical to SEQ ID NO: 2649

SEQ ID NO: 3031 - protein, 21 aa, Plasmodium falciparum
KNELMGKTIKNQVGVDTNIYH

SEQ ID NO: 3032 - protein, 46 aa, Plasmodium falciparum; identical to SEQ ID NO: 2651

SEQ ID NO: 3033 - protein, 20 aa, Plasmodium falciparum
HRLEYHNINKDNSFNIPPEK

SEQ ID NO: 3034 - protein, 32 aa, Plasmodium falciparum; identical to SEQ ID NO: 2653

SEQ ID NO: 3035 - protein, 15 aa, Plasmodium falciparum
HNINKDNSFNIPPEK

SEQ ID NO: 3036 - protein, 27 aa, Plasmodium falciparum
HNINKDNSFNIPPEKNKSYNNISEHIK

SEQ ID NO: 3037 - protein, 21 aa, Plasmodium falciparum
KDNSFNIPPEKNKSYNNISEH

SEQ ID NO: 3038 - protein, 37 aa, Plasmodium falciparum; identical to SEQ ID NO: 2657

SEQ ID NO: 3039 - protein, 11 aa, Plasmodium falciparum
KSYNNISEHIK

SEQ ID NO: 3040 - protein, 25 aa, Plasmodium falciparum
KSYNNISEHIKINYPLLFEALACCH

SEQ ID NO: 3041 - protein, 49 aa, Plasmodium falciparum; identical to SEQ ID NO: 2660

SEQ ID NO: 3042 - protein, 26 aa, Plasmodium falciparum
KKKNCSYDFQKIDGDKNIGANDERCH

SEQ ID NO: 3043 - protein, 25 aa, Plasmodium falciparum
KKNCSYDFQKIDGDKNIGANDERCH

SEQ ID NO: 3044 - protein, 24 aa, Plasmodium falciparum
KNCSYDFQKIDGDKNIGANDERCH

SEQ ID NO: 3045 - protein, 20 aa, Plasmodium falciparum
KSKNINLLNVKRSFVESNLH

SEQ ID NO: 3046 - protein, 40 aa, Plasmodium falciparum; identical to SEQ ID NO: 2665

SEQ ID NO: 3047 - protein, 18 aa, Plasmodium falciparum
KNINLLNVKRSFVESNLH

SEQ ID NO: 3048 - protein, 38 aa, Plasmodium falciparum; identical to SEQ ID NO: 2667

SEQ ID NO: 3049 - protein, 33 aa, Plasmodium falciparum; identical to SEQ ID NO: 2668

SEQ ID NO: 3050 - protein, 34 aa, Plasmodium falciparum; identical to SEQ ID NO: 2669

SEQ ID NO: 3051 - protein, 41 aa, Plasmodium falciparum; identical to SEQ ID NO: 2670

SEQ ID NO: 3052 - protein, 47 aa, Plasmodium falciparum; identical to SEQ ID NO: 2671

SEQ ID NO: 3053 - protein, 51 aa, Plasmodium falciparum; identical to SEQ ID NO: 2672

SEQ ID NO: 3054 - protein, 14 aa, Plasmodium falciparum
KNNKQKKKLVWYNH

SEQ ID NO: 3055 - protein, 23 aa, Plasmodium falciparum
KNNKQKKKLVWYNHKNDTYLKGH

SEQ ID NO: 3056 - protein, 10 aa, Plasmodium falciparum
KKKLVWYNHK

SEQ ID NO: 3057 - protein, 18 aa, Plasmodium falciparum
KKKLVWYNHKNDTYLKGH

SEQ ID NO: 3058 - protein, 9 aa, Plasmodium falciparum
KKLVWYNHK

SEQ ID NO: 3059 - protein, 17 aa, Plasmodium falciparum
KKLVWYNHKNDTYLKGH

SEQ ID NO: 3060 - protein, 8 aa, Plasmodium falciparum
KLVWYNHK

SEQ ID NO: 3061 - protein, 16 aa, Plasmodium falciparum
KLVWYNHKNDTYLKGH

SEQ ID NO: 3062 - protein, 8 aa, Plasmodium falciparum
HKNDTYLK

SEQ ID NO: 3063 - protein, 12 aa, Plasmodium falciparum
HKNDTYLKGHDK

SEQ ID NO: 3064 - protein, 9 aa, Plasmodium falciparum
KNDTYLKGH

SEQ ID NO: 3065 - protein, 11 aa, Plasmodium falciparum
KNDTYLKGHDK

SEQ ID NO: 3066 - protein, 25 aa, Plasmodium falciparum
HKCTYNNSILYRNNFLYKKENKKDK

SEQ ID NO: 3067 - protein, 28 aa, Plasmodium falciparum
HKCTYNNSILYRNNFLYKKENKKDKNYK

SEQ ID NO: 3068 - protein, 19 aa, Plasmodium falciparum
KKENKKDKNYKNISTLYEH

SEQ ID NO: 3069 - protein, 18 aa, Plasmodium falciparum
KENKKDKNYKNISTLYEH

SEQ ID NO: 3070 - protein, 15 aa, Plasmodium falciparum
KKDKNYKNISTLYEH

SEQ ID NO: 3071 - protein, 18 aa, Plasmodium falciparum
HRTNDIQFDKLCDILINK

SEQ ID NO: 3072 - protein, 36 aa, Plasmodium falciparum; identical to SEQ ID NO: 2691

SEQ ID NO: 3073 - protein, 37 aa, Plasmodium falciparum; identical to SEQ ID NO: 2692

SEQ ID NO: 3074 - protein, 38 aa, Plasmodium falciparum; identical to SEQ ID NO: 2693

SEQ ID NO: 3075 - protein, 34 aa, Plasmodium falciparum; identical to SEQ ID NO: 2694

SEQ ID NO: 3076 - protein, 46 aa, Plasmodium falciparum; identical to SEQ ID NO: 2695

SEQ ID NO: 3077 - protein, 14 aa, Plasmodium falciparum
KAFIFLKKKFYSFH

SEQ ID NO: 3078 - protein, 26 aa, Plasmodium falciparum
KAFIFLKKKFYSFHLPYYEECKNIVH

SEQ ID NO: 3079 - protein, 33 aa, Plasmodium falciparum; identical to SEQ ID NO: 2698

SEQ ID NO: 3080 - protein, 43 aa, Plasmodium falciparum; identical to SEQ ID NO: 2699

SEQ ID NO: 3081 - protein, 50 aa, Plasmodium falciparum; identical to SEQ ID NO: 2700

SEQ ID NO: 3082 - protein, 17 aa, Plasmodium falciparum
HLPYYEECKNIVHYIMK

SEQ ID NO: 3083 - protein, 18 aa, Plasmodium falciparum
HLPYYEECKNIVHYIMKK

SEQ ID NO: 3084 - protein, 19 aa, Plasmodium falciparum
HLPYYEECKNIVHYIMKKK

SEQ ID NO: 3085 - protein, 24 aa, Plasmodium falciparum
HLPYYEECKNIVHYIMKKKHKKIK

SEQ ID NO: 3086 - protein, 9 aa, Plasmodium falciparum
KNIVHYIMK

SEQ ID NO: 3087 - protein, 10 aa, Plasmodium falciparum
KNIVHYIMKK

SEQ ID NO: 3088 - protein, 11 aa, Plasmodium falciparum
KNIVHYIMKKK

SEQ ID NO: 3089 - protein, 12 aa, Plasmodium falciparum
KNIVHYIMKKKH

SEQ ID NO: 3090 - protein, 22 aa, Plasmodium falciparum
KNIVHYIMKKKHKKIKNIINNH

SEQ ID NO: 3091 - protein, 29 aa, Plasmodium falciparum
KNIVHYIMKKKHKKIKNIINNHNSNLYYH

SEQ ID NO: 3092 - protein, 12 aa, Plasmodium falciparum
HYIMKKKHKKIK

SEQ ID NO: 3093 - protein, 45 aa, Plasmodium falciparum; identical to SEQ ID NO: 2712

SEQ ID NO: 3094 - protein, 8 aa, Plasmodium falciparum
KKKHKKIK

SEQ ID NO: 3095 - protein, 14 aa, Plasmodium falciparum
KKKHKKIKNIINNH

SEQ ID NO: 3096 - protein, 21 aa, Plasmodium falciparum
KKKHKKIKNIINNHNSNLYYH

SEQ ID NO: 3097 - protein, 7 aa, Plasmodium falciparum
KKHKKIK

SEQ ID NO: 3098 - protein, 13 aa, Plasmodium falciparum
KKHKKIKNIINNH

SEQ ID NO: 3099 - protein, 20 aa, Plasmodium falciparum
KKHKKIKNIINNHNSNLYYH

SEQ ID NO: 3100 - protein, 38 aa, Plasmodium falciparum; identical to SEQ ID NO: 2719

SEQ ID NO: 3101 - protein, 46 aa, Plasmodium falciparum; identical to SEQ ID NO: 2720

SEQ ID NO: 3102 - protein, 28 aa, Plasmodium falciparum
HNSNLYYHYNIIDTFVKRMNKEYMCFNK

SEQ ID NO: 3103 - protein, 36 aa, Plasmodium falciparum; identical to SEQ ID NO: 2722

SEQ ID NO: 3104 - protein, 21 aa, Plasmodium falciparum
HYNIIDTFVKRMNKEYMCFNK

SEQ ID NO: 3105 - protein, 29 aa, Plasmodium falciparum
HYNIIDTFVKRMNKEYMCFNKLLYKIQQK

SEQ ID NO: 3106 - protein, 23 aa, Plasmodium falciparum
KEYMCFNKLLYKIQQKLLYNLIH

SEQ ID NO: 3107 - protein, 42 aa, Plasmodium falciparum; identical to SEQ ID NO: 2726

SEQ ID NO: 3108 - protein, 16 aa, Plasmodium falciparum
KLLYKIQQKLLYNLIH

SEQ ID NO: 3109 - protein, 35 aa, Plasmodium falciparum; identical to SEQ ID NO: 2728

SEQ ID NO: 3110 - protein, 37 aa, Plasmodium falciparum; identical to SEQ ID NO: 2729

SEQ ID NO: 3111 - protein, 38 aa, Plasmodium falciparum; identical to SEQ ID NO: 2730

SEQ ID NO: 3112 - protein, 42 aa, Plasmodium falciparum; identical to SEQ ID NO: 2731

SEQ ID NO: 3113 - protein, 44 aa, Plasmodium falciparum; identical to SEQ ID NO: 2732

SEQ ID NO: 3114 - protein, 46 aa, Plasmodium falciparum; identical to SEQ ID NO: 2733

SEQ ID NO: 3115 - protein, 50 aa, Plasmodium falciparum; identical to SEQ ID NO: 2734

SEQ ID NO: 3116 - protein, 18 aa, Plasmodium falciparum
HLIGNNNNNNNKNNSKEK

SEQ ID NO: 3117 - protein, 19 aa, Plasmodium falciparum
HLIGNNNNNNNKNNSKEKK

SEQ ID NO: 3118 - protein, 23 aa, Plasmodium falciparum
HLIGNNNNNNNKNNSKEKKLPLK

SEQ ID NO: 3119 - protein, 25 aa, Plasmodium falciparum
HLIGNNNNNNNKNNSKEKKLPLKNK

SEQ ID NO: 3120 - protein, 27 aa, Plasmodium falciparum
HLIGNNNNNNNKNNSKEKKLPLKNKMK

SEQ ID NO: 3121 - protein, 31 aa, Plasmodium falciparum; identical to SEQ ID NO: 2740

SEQ ID NO: 3122 - protein, 17 aa, Plasmodium falciparum
KNNSKEKKLPLKNKMKH

SEQ ID NO: 3123 - protein, 38 aa, Plasmodium falciparum; identical to SEQ ID NO: 2742

SEQ ID NO: 3124 - protein, 46 aa, Plasmodium falciparum; identical to SEQ ID NO: 2743

SEQ ID NO: 3125 - protein, 47 aa, Plasmodium falciparum; identical to SEQ ID NO: 2744

SEQ ID NO: 3126 - protein, 13 aa, Plasmodium falciparum
KEKKLPLKNKMKH

SEQ ID NO: 3127 - protein, 34 aa, Plasmodium falciparum; identical to SEQ ID NO: 2746

SEQ ID NO: 3128 - protein, 42 aa, Plasmodium falciparum; identical to SEQ ID NO: 2747

SEQ ID NO: 3129 - protein, 43 aa, Plasmodium falciparum; identical to SEQ ID NO: 2748

SEQ ID NO: 3130 - protein, 40 aa, Plasmodium falciparum; identical to SEQ ID NO: 2749

SEQ ID NO: 3131 - protein, 41 aa, Plasmodium falciparum; identical to SEQ ID NO: 2750

SEQ ID NO: 3132 - protein, 11 aa, Plasmodium falciparum
KKLPLKNKMKH

SEQ ID NO: 3133 - protein, 32 aa, Plasmodium falciparum; identical to SEQ ID NO: 2752

SEQ ID NO: 3134 - protein, 10 aa, Plasmodium falciparum
KLPLKNKMKH

SEQ ID NO: 3135 - protein, 31 aa, Plasmodium falciparum; identical to SEQ ID NO: 2754

SEQ ID NO: 3136 - protein, 39 aa, Plasmodium falciparum; identical to SEQ ID NO: 2755

SEQ ID NO: 3137 - protein, 40 aa, Plasmodium falciparum; identical to SEQ ID NO: 2756

SEQ ID NO: 3138 - protein, 9 aa, Plasmodium falciparum
KNKMKHIRK

SEQ ID NO: 3139 - protein, 27 aa, Plasmodium falciparum
KNKMKHIRKNESNDNITFNTYTSNNIH

SEQ ID NO: 3140 - protein, 35 aa, Plasmodium falciparum; identical to SEQ ID NO: 2759

SEQ ID NO: 3141 - protein, 36 aa, Plasmodium falciparum; identical to SEQ ID NO: 2760

SEQ ID NO: 3142 - protein, 7 aa, Plasmodium falciparum
KMKHIRK

SEQ ID NO: 3143 - protein, 25 aa, Plasmodium falciparum
KMKHIRKNESNDNITFNTYTSNNIH

SEQ ID NO: 3144 - protein, 33 aa, Plasmodium falciparum; identical to SEQ ID NO: 2763

SEQ ID NO: 3145 - protein, 34 aa, Plasmodium falciparum; identical to SEQ ID NO: 2764

SEQ ID NO: 3146 - protein, 32 aa, Plasmodium falciparum; identical to SEQ ID NO: 2765

SEQ ID NO: 3147 - protein, 11 aa, Plasmodium falciparum
HLSKYKYVHHK

SEQ ID NO: 3148 - protein, 34 aa, Plasmodium falciparum; identical to SEQ ID NO: 2767

SEQ ID NO: 3149 - protein, 35 aa, Plasmodium falciparum; identical to SEQ ID NO: 2768

SEQ ID NO: 3150 - protein, 41 aa, Plasmodium falciparum; identical to SEQ ID NO: 2769

SEQ ID NO: 3151 - protein, 42 aa, Plasmodium falciparum; identical to SEQ ID NO: 2770

SEQ ID NO: 3152 - protein, 43 aa, Plasmodium falciparum; identical to SEQ ID NO: 2771

SEQ ID NO: 3153 - protein, 51 aa, Plasmodium falciparum; identical to SEQ ID NO: 2772

SEQ ID NO: 3154 - protein, 8 aa, Plasmodium falciparum
KYKYVHHK

SEQ ID NO: 3155 - protein, 44 aa, Plasmodium falciparum; identical to SEQ ID NO: 2774

SEQ ID NO: 3156 - protein, 49 aa, Plasmodium falciparum; identical to SEQ ID NO: 2775

SEQ ID NO: 3157 - protein, 26 aa, Plasmodium falciparum
HHKNYYYPDSCTNLRKKKNSLFYNLK

SEQ ID NO: 3158 - protein, 27 aa, Plasmodium falciparum
HHKNYYYPDSCTNLRKKKNSLFYNLKK

SEQ ID NO: 3159 - protein, 33 aa, Plasmodium falciparum; identical to SEQ ID NO: 2778

SEQ ID NO: 3160 - protein, 34 aa, Plasmodium falciparum; identical to SEQ ID NO: 2779

SEQ ID NO: 3161 - protein, 35 aa, Plasmodium falciparum; identical to SEQ ID NO: 2780

SEQ ID NO: 3162 - protein, 43 aa, Plasmodium falciparum; identical to SEQ ID NO: 2781

SEQ ID NO: 3163 - protein, 49 aa, Plasmodium falciparum; identical to SEQ ID NO: 2782

SEQ ID NO: 3164 - protein, 25 aa, Plasmodium falciparum
HKNYYYPDSCTNLRKKKNSLFYNLK

SEQ ID NO: 3165 - protein, 26 aa, Plasmodium falciparum
HKNYYYPDSCTNLRKKKNSLFYNLKK

SEQ ID NO: 3166 - protein, 32 aa, Plasmodium falciparum; identical to SEQ ID NO: 2785

SEQ ID NO: 3167 - protein, 33 aa, Plasmodium falciparum; identical to SEQ ID NO: 2786

SEQ ID NO: 3168 - protein, 34 aa, Plasmodium falciparum; identical to SEQ ID NO: 2787

SEQ ID NO: 3169 - protein, 42 aa, Plasmodium falciparum; identical to SEQ ID NO: 2788

SEQ ID NO: 3170 - protein, 48 aa, Plasmodium falciparum; identical to SEQ ID NO: 2789

SEQ ID NO: 3171 - protein, 24 aa, Plasmodium falciparum
KKKNSLFYNLKKYIYYEKKKYLQH

SEQ ID NO: 3172 - protein, 29 aa, Plasmodium falciparum
KKKNSLFYNLKKYIYYEKKKYLQHCLLKH

SEQ ID NO: 3173 - protein, 23 aa, Plasmodium falciparum
KKNSLFYNLKKYIYYEKKKYLQH

SEQ ID NO: 3174 - protein, 28 aa, Plasmodium falciparum
KKNSLFYNLKKYIYYEKKKYLQHCLLKH

SEQ ID NO: 3175 - protein, 22 aa, Plasmodium falciparum
KNSLFYNLKKYIYYEKKKYLQH

SEQ ID NO: 3176 - protein, 27 aa, Plasmodium falciparum
KNSLFYNLKKYIYYEKKKYLQHCLLKH

SEQ ID NO: 3177 - protein, 14 aa, Plasmodium falciparum
KKYIYYEKKKYLQH

SEQ ID NO: 3178 - protein, 19 aa, Plasmodium falciparum
KKYIYYEKKKYLQHCLLKH

SEQ ID NO: 3179 - protein, 49 aa, Plasmodium falciparum; identical to SEQ ID NO: 2798

SEQ ID NO: 3180 - protein, 13 aa, Plasmodium falciparum
KYIYYEKKKYLQH

SEQ ID NO: 3181 - protein, 18 aa, Plasmodium falciparum
KYIYYEKKKYLQHCLLKH

SEQ ID NO: 3182 - protein, 48 aa, Plasmodium falciparum; identical to SEQ ID NO: 2801

SEQ ID NO: 3183 - protein, 11 aa, Plasmodium falciparum
KKKYLQHCLLK

SEQ ID NO: 3184 - protein, 12 aa, Plasmodium falciparum
KKKYLQHCLLKH

SEQ ID NO: 3185 - protein, 42 aa, Plasmodium falciparum; identical to SEQ ID NO: 2804

SEQ ID NO: 3186 - protein, 10 aa, Plasmodium falciparum
KKYLQHCLLK

SEQ ID NO: 3187 - protein, 11 aa, Plasmodium falciparum
KKYLQHCLLKH

SEQ ID NO: 3188 - protein, 41 aa, Plasmodium falciparum; identical to SEQ ID NO: 2807

SEQ ID NO: 3189 - protein, 9 aa, Plasmodium falciparum
KYLQHCLLK

SEQ ID NO: 3190 - protein, 10 aa, Plasmodium falciparum
KYLQHCLLKH

SEQ ID NO: 3191 - protein, 40 aa, Plasmodium falciparum; identical to SEQ ID NO: 2810

SEQ ID NO: 3192 - protein, 11 aa, Plasmodium falciparum
HCLLKHDNYKK

SEQ ID NO: 3193 - protein, 18 aa, Plasmodium falciparum
HCLLKHDNYKKVELPRIK

SEQ ID NO: 3194 - protein, 7 aa, Plasmodium falciparum
KHDNYKK

SEQ ID NO: 3195 - protein, 32 aa, Plasmodium falciparum; identical to SEQ ID NO: 2814

SEQ ID NO: 3196 - protein, 13 aa, Plasmodium falciparum
HDNYKKVELPRIK

SEQ ID NO: 3197 - protein, 27 aa, Plasmodium falciparum
KKVELPRIKDINYSYQMESIKTRNFIH

SEQ ID NO: 3198 - protein, 26 aa, Plasmodium falciparum
KVELPRIKDINYSYQMESIKTRNFIH

SEQ ID NO: 3199 - protein, 29 aa, Plasmodium falciparum
HSLSEQFAFSNLILSFYIIKNDDNNVYNK

SEQ ID NO: 3200 - protein, 35 aa, Plasmodium falciparum; identical to SEQ ID NO: 2819

SEQ ID NO: 3201 - protein, 41 aa, Plasmodium falciparum; identical to SEQ ID NO: 2820

SEQ ID NO: 3202 - protein, 47 aa, Plasmodium falciparum; identical to SEQ ID NO: 2821

SEQ ID NO: 3203 - protein, 49 aa, Plasmodium falciparum; identical to SEQ ID NO: 2822

SEQ ID NO: 3204 - protein, 43 aa, Plasmodium falciparum; identical to SEQ ID NO: 2823

SEQ ID NO: 3205 - protein, 37 aa, Plasmodium falciparum; identical to SEQ ID NO: 2824

SEQ ID NO: 3206 - protein, 31 aa, Plasmodium falciparum; identical to SEQ ID NO: 2825

SEQ ID NO: 3207 - protein, 25 aa, Plasmodium falciparum
KNYIYNKNNIYNKNNIYNKKNILTH

SEQ ID NO: 3208 - protein, 49 aa, Plasmodium falciparum; identical to SEQ ID NO: 2827

SEQ ID NO: 3209 - protein, 19 aa, Plasmodium falciparum
KNNIYNKNNIYNKKNILTH

SEQ ID NO: 3210 - protein, 43 aa, Plasmodium falciparum; identical to SEQ ID NO: 2829

SEQ ID NO: 3211 - protein, 13 aa, Plasmodium falciparum
KNNIYNKKNILTH

SEQ ID NO: 3212 - protein, 37 aa, Plasmodium falciparum; identical to SEQ ID NO: 2831

SEQ ID NO: 3213 - protein, 9 aa, Plasmodium falciparum
KKNILTHAK

SEQ ID NO: 3214 - protein, 31 aa, Plasmodium falciparum; identical to SEQ ID NO: 2833

SEQ ID NO: 3215 - protein, 49 aa, Plasmodium falciparum; identical to SEQ ID NO: 2834

SEQ ID NO: 3216 - protein, 8 aa, Plasmodium falciparum
KNILTHAK

SEQ ID NO: 3217 - protein, 30 aa, Plasmodium falciparum; identical to SEQ ID NO: 2836

SEQ ID NO: 3218 - protein, 48 aa, Plasmodium falciparum; identical to SEQ ID NO: 2837

SEQ ID NO: 3219 - protein, 12 aa, Plasmodium falciparum
HAKSVLLSGSSK

SEQ ID NO: 3220 - protein, 13 aa, Plasmodium falciparum
HAKSVLLSGSSKK

SEQ ID NO: 3221 - protein, 26 aa, Plasmodium falciparum
HAKSVLLSGSSKKFLKFFSNIIRRHK

SEQ ID NO: 3222 - protein, 33 aa, Plasmodium falciparum; identical to SEQ ID NO: 2841

SEQ ID NO: 3223 - protein, 34 aa, Plasmodium falciparum; identical to SEQ ID NO: 2842

SEQ ID NO: 3224 - protein, 37 aa, Plasmodium falciparum; identical to SEQ ID NO: 2843

SEQ ID NO: 3225 - protein, 40 aa, Plasmodium falciparum; identical to SEQ ID NO: 2844

SEQ ID NO: 3226 - protein, 49 aa, Plasmodium falciparum; identical to SEQ ID NO: 2845

SEQ ID NO: 3227 - protein, 23 aa, Plasmodium falciparum
KSVLLSGSSKKFLKFFSNIIRRH

SEQ ID NO: 3228 - protein, 41 aa, Plasmodium falciparum; identical to SEQ ID NO: 2847

SEQ ID NO: 3229 - protein, 49 aa, Plasmodium falciparum; identical to SEQ ID NO: 2848

SEQ ID NO: 3230 - protein, 11 aa, Plasmodium falciparum
KFFSNIIRRHK

SEQ ID NO: 3231 - protein, 28 aa, Plasmodium falciparum
KFFSNIIRRHKLKEKKNKKNIKRYKMNH

SEQ ID NO: 3232 - protein, 36 aa, Plasmodium falciparum; identical to SEQ ID NO: 2851

SEQ ID NO: 3233 - protein, 44 aa, Plasmodium falciparum; identical to SEQ ID NO: 2852

SEQ ID NO: 3234 - protein, 9 aa, Plasmodium falciparum
HKLKEKKNK

SEQ ID NO: 3235 - protein, 10 aa, Plasmodium falciparum
HKLKEKKNKK

SEQ ID NO: 3236 - protein, 13 aa, Plasmodium falciparum
HKLKEKKNKKNIK

SEQ ID NO: 3237 - protein, 16 aa, Plasmodium falciparum
HKLKEKKNKKNIKRYK

SEQ ID NO: 3238 - protein, 25 aa, Plasmodium falciparum
HKLKEKKNKKNIKRYKMNHVNNTSK

SEQ ID NO: 3239 - protein, 45 aa, Plasmodium falciparum; identical to SEQ ID NO: 2858

SEQ ID NO: 3240 - protein, 47 aa, Plasmodium falciparum; identical to SEQ ID NO: 2859

SEQ ID NO: 3241 - protein, 18 aa, Plasmodium falciparum
KLKEKKNKKNIKRYKMNH

SEQ ID NO: 3242 - protein, 26 aa, Plasmodium falciparum
KLKEKKNKKNIKRYKMNHVNNTSKGH

SEQ ID NO: 3243 - protein, 34 aa, Plasmodium falciparum; identical to SEQ ID NO: 2862

SEQ ID NO: 3244 - protein, 16 aa, Plasmodium falciparum
KEKKNKKNIKRYKMNH

SEQ ID NO: 3245 - protein, 24 aa, Plasmodium falciparum
KEKKNKKNIKRYKMNHVNNTSKGH

SEQ ID NO: 3246 - protein, 32 aa, Plasmodium falciparum; identical to SEQ ID NO: 2865

SEQ ID NO: 3247 - protein, 14 aa, Plasmodium falciparum
KKNKKNIKRYKMNH

SEQ ID NO: 3248 - protein, 22 aa, Plasmodium falciparum
KKNKKNIKRYKMNHVNNTSKGH

SEQ ID NO: 3249 - protein, 30 aa, Plasmodium falciparum; identical to SEQ ID NO: 2868

SEQ ID NO: 3250 - protein, 13 aa, Plasmodium falciparum
KNKKNIKRYKMNH

SEQ ID NO: 3251 - protein, 21 aa, Plasmodium falciparum
KNKKNIKRYKMNHVNNTSKGH

SEQ ID NO: 3252 - protein, 29 aa, Plasmodium falciparum
KNKKNIKRYKMNHVNNTSKGHIILNMCTH

SEQ ID NO: 3253 - protein, 11 aa, Plasmodium falciparum
KKNIKRYKMNH

SEQ ID NO: 3254 - protein, 19 aa, Plasmodium falciparum
KKNIKRYKMNHVNNTSKGH

SEQ ID NO: 3255 - protein, 27 aa, Plasmodium falciparum
KKNIKRYKMNHVNNTSKGHIILNMCTH

SEQ ID NO: 3256 - protein, 10 aa, Plasmodium falciparum
KNIKRYKMNH

SEQ ID NO: 3257 - protein, 18 aa, Plasmodium falciparum
KNIKRYKMNHVNNTSKGH

SEQ ID NO: 3258 - protein, 26 aa, Plasmodium falciparum
KNIKRYKMNHVNNTSKGHIILNMCTH

SEQ ID NO: 3259 - protein, 10 aa, Plasmodium falciparum
KMNHVNNTSK

SEQ ID NO: 3260 - protein, 12 aa, Plasmodium falciparum
KMNHVNNTSKGH

SEQ ID NO: 3261 - protein, 20 aa, Plasmodium falciparum
KMNHVNNTSKGHIILNMCTH

SEQ ID NO: 3262 - protein, 27 aa, Plasmodium falciparum
HVNNTSKGHIILNMCTHGFKKDYSSLK

SEQ ID NO: 3263 - protein, 29 aa, Plasmodium falciparum
HVNNTSKGHIILNMCTHGFKKDYSSLKNK

SEQ ID NO: 3264 - protein, 36 aa, Plasmodium falciparum; identical to SEQ ID NO: 2883

SEQ ID NO: 3265 - protein, 19 aa, Plasmodium falciparum
HIILNMCTHGFKKDYSSLK

SEQ ID NO: 3266 - protein, 21 aa, Plasmodium falciparum
HIILNMCTHGFKKDYSSLKNK

SEQ ID NO: 3267 - protein, 28 aa, Plasmodium falciparum
HIILNMCTHGFKKDYSSLKNKYRIVNNK

SEQ ID NO: 3268 - protein, 11 aa, Plasmodium falciparum
HGFKKDYSSLK

SEQ ID NO: 3269 - protein, 13 aa, Plasmodium falciparum
HGFKKDYSSLKNK

SEQ ID NO: 3270 - protein, 20 aa, Plasmodium falciparum
HGFKKDYSSLKNKYRIVNNK

SEQ ID NO: 3271 - protein, 30 aa, Plasmodium falciparum; identical to SEQ ID NO: 2890

SEQ ID NO: 3272 - protein, 29 aa, Plasmodium falciparum
KDYSSLKNKYRIVNNKRYMLKNDNVYDRH

SEQ ID NO: 3273 - protein, 23 aa, Plasmodium falciparum
KNKYRIVNNKRYMLKNDNVYDRH

SEQ ID NO: 3274 - protein, 21 aa, Plasmodium falciparum
KYRIVNNKRYMLKNDNVYDRH

SEQ ID NO: 3275 - protein, 14 aa, Plasmodium falciparum
HLLVDKCKRNICHK

SEQ ID NO: 3276 - protein, 22 aa, Plasmodium falciparum
HLLVDKCKRNICHKYTDIKNIK

SEQ ID NO: 3277 - protein, 9 aa, Plasmodium falciparum
KCKRNICHK

SEQ ID NO: 3278 - protein, 7 aa, Plasmodium falciparum
KRNICHK

SEQ ID NO: 3279 - protein, 10 aa, Plasmodium falciparum
HKYTDIKNIK

SEQ ID NO: 3280 - protein, 40 aa, Plasmodium falciparum; identical to SEQ ID NO: 2899

SEQ ID NO: 3281 - protein, 41 aa, Plasmodium falciparum; identical to SEQ ID NO: 2900

SEQ ID NO: 3282 - protein, 17 aa, Plasmodium falciparum
HLPYYEECKNIVHYIMK

SEQ ID NO: 3283 - protein, 18 aa, Plasmodium falciparum
HLPYYEECKNIVHYIMKK

SEQ ID NO: 3284 - protein, 19 aa, Plasmodium falciparum
HLPYYEECKNIVHYIMKKK

SEQ ID NO: 3285 - protein, 24 aa, Plasmodium falciparum
HLPYYEECKNIVHYIMKKKHKKIK

SEQ ID NO: 3286 - protein, 4 aa, Plasmodium falciparum
KHKK

SEQ ID NO: 3287 - protein, 9 aa, Plasmodium falciparum
KNIVHYIMK

SEQ ID NO: 3288 - protein, 10 aa, Plasmodium falciparum
KNIVHYIMKK

SEQ ID NO: 3289 - protein, 11 aa, Plasmodium falciparum
KNIVHYIMKKK

SEQ ID NO: 3290 - protein, 12 aa, Plasmodium falciparum
KNIVHYIMKKKH

SEQ ID NO: 3291 - protein, 22 aa, Plasmodium falciparum
KNIVHYIMKKKHKKIKNIINNH

SEQ ID NO: 3292 - protein, 4 aa, Plasmodium falciparum
KHKK

SEQ ID NO: 3293 - protein, 29 aa, Plasmodium falciparum
KNIVHYIMKKKHKKIKNIINNHNSNLYYH

SEQ ID NO: 3294 - protein, 4 aa, Plasmodium falciparum
KHKK

SEQ ID NO: 3295 - protein, 12 aa, Plasmodium falciparum
HYIMKKKHKKIK

SEQ ID NO: 3296 - protein, 4 aa, Plasmodium falciparum
KHKK

SEQ ID NO: 3297 - protein, 45 aa, Plasmodium falciparum; identical to SEQ ID NO: 2712

SEQ ID NO: 3298 - protein, 4 aa, Plasmodium falciparum
KHKK

SEQ ID NO: 3299 - protein, 8 aa, Plasmodium falciparum
KKKHKKIK

SEQ ID NO: 3300 - protein, 14 aa, Plasmodium falciparum
KKKHKKIKNIINNH

SEQ ID NO: 3301 - protein, 4 aa, Plasmodium falciparum
KHKK

SEQ ID NO: 3302 - protein, 21 aa, Plasmodium falciparum
KKKHKKIKNIINNHNSNLYYH

SEQ ID NO: 3303 - protein, 4 aa, Plasmodium falciparum
KHKK

SEQ ID NO: 3304 - protein, 7 aa, Plasmodium falciparum
KKHKKIK

SEQ ID NO: 3305 - protein, 4 aa, Plasmodium falciparum
KHKK

SEQ ID NO: 3306 - protein, 13 aa, Plasmodium falciparum
KKHKKIKNIINNH

SEQ ID NO: 3307 - protein, 4 aa, Plasmodium falciparum
KHKK

SEQ ID NO: 3308 - protein, 20 aa, Plasmodium falciparum
KKHKKIKNIINNHNSNLYYH

SEQ ID NO: 3309 - protein, 4 aa, Plasmodium falciparum
KHKK

SEQ ID NO: 3310 - protein, 38 aa, Plasmodium falciparum; identical to SEQ ID NO: 2719

SEQ ID NO: 3311 - protein, 46 aa, Plasmodium falciparum; identical to SEQ ID NO: 2720

SEQ ID NO: 3312 - protein, 28 aa, Plasmodium falciparum
HNSNLYYHYNIIDTFVKRMNKEYMCFNK

SEQ ID NO: 3313 - protein, 36 aa, Plasmodium falciparum; identical to SEQ ID NO: 2722

SEQ ID NO: 3314 - protein, 23 aa, Human immunodeficiency virus
KCSYHCLVCFQKKGLGISYGRKK

SEQ ID NO: 3315 - protein, 29 aa, Goose influenza virus
KKGTSYPKLSKSYTNNKGKEVLVLWGVHH

SEQ ID NO: 3316 - protein, 29 aa, Human influenza virus
KKGSSYPKLSKSYVNNKGKEVLVLWGVHH

SEQ ID NO: 3317 - protein, 29 aa, Goose influenza virus
KKENSYPKLSKSYVNNKGKEVLVLWGVHH

SEQ ID NO: 3318 - protein, 29 aa, Human influenza virus
KKGDSYPKLTNSYVNNKGKEVLVLWGVHH

SEQ ID NO: 3319 - protein, 29 aa, Human influenza virus
KKGTSYPKLSKSYTNNKGKEVLVLWGVHH

SEQ ID NO: 3320 - protein, 29 aa, Human influenza virus
KKGTSYPKLSKSYTNNKGKEVLVLWGVHH

SEQ ID NO: 3321 - protein, 29 aa, Human influenza virus
KKGNSYPKLSKSYTNNKGKEVLVIWGVHH

SEQ ID NO: 3322 - protein, 29 aa, Human influenza virus
KKGNSYPKLSKSYTNNKGKEVLVIWGVHH

SEQ ID NO: 3323 - protein, 29 aa, Human influenza virus
KKGNSYPKLSKSYTNNKGKEVLVIWGVHH

SEQ ID NO: 3324 - protein, 29 aa, Human influenza virus
KKGTSYPKLSKSYTNNKGKEVLVLWGVHH

SEQ ID NO: 3325 - protein, 29 aa, Human influenza virus
KKGNSYPKLSKSYTNNKGKEVLVIWGWHH

SEQ ID NO: 3326 - protein, 29 aa, Human influenza virus
KKGNSYPKLSKSYTNNKGKEVLVIWGVHH

SEQ ID NO: 3327 - protein, 29 aa, Human influenza virus
KKGNSYPKLSKSYTNNKGKEVLVIWGVHH

SEQ ID NO: 3328 - protein, 29 aa, Human influenza virus
KKGNSYPKLSKSYTNNKGKEVLVIWGVHH

SEQ ID NO: 3329 - protein, 29 aa, Human influenza virus
KKGTSYPKLSKSYTNNKGKEVLVLWGVHH

SEQ ID NO: 3330 - protein, 29 aa, Human influenza virus
KKGNSYPKLSKSYTNNKGKEVLVIWGVHH

SEQ ID NO: 3331 - protein, 29 aa, Human influenza virus
KKGTSYPKLSKSYTNNKGKEVLVLWGVHH

SEQ ID NO: 3332 - protein, 29 aa, Human influenza virus
KKGNSYPKLSKSYTNNKGKEVLVIWGVHH

SEQ ID NO: 3333 - protein, 29 aa, Human influenza virus
KKGNSYPKLSKSYTNNKGKEVLVIWGVHH

SEQ ID NO: 3334 - protein, 29 aa, Human influenza virus
KKGNSYPKLSKSYTNNKGKEVLVIWGVHH

SEQ ID NO: 3335 - protein, 29 aa, Human influenza virus
KKGNSYPKLSKSYTNNKGKEVLVIWGVHH

SEQ ID NO: 3336 - protein, 29 aa, Human influenza virus
KKGNSYPKLSKSYTNNKGKEVLVIWGVHH

SEQ ID NO: 3337 - protein, 29 aa, Human influenza virus
KKGNSYPKLSKSYTNNKGKEVLVIWGVHH

SEQ ID NO: 3338 - protein, 29 aa, Human influenza virus
KKGNSYPKLSKSYTNNKGKEVLVIWGVHH

SEQ ID NO: 3339 - protein, 29 aa, Human influenza virus
KKGNSYPKLSKSYTNNKGKEVLVIWGVHH

SEQ ID NO: 3340 - protein, 29 aa, Human influenza virus
KKGNSYPKLSKSYTNNKGKEVLVIWGVHH

SEQ ID NO: 3341 - protein, 29 aa, Human influenza virus
KKGSSYPKLSKSYVNNKGKEVLVLWGVHH

SEQ ID NO: 3342 - protein, 29 aa, Human influenza virus
KKGSSYPKLSKSYVNNKGKEVLVLWGVHH

SEQ ID NO: 3343 - protein, 29 aa, Human influenza virus
KKGSSYPKLSKSYVNNKGKEVLVLWGVHH

SEQ ID NO: 3344 - protein, 28 aa, Human influenza virus
KNGLYPNLSKSYANNKEKEVLVLWGVHH

SEQ ID NO: 3345 - protein, 29 aa, Human influenza virus
KKGNSYPKLSKSYTNNKGKEVLVIWGVHH

SEQ ID NO: 3346 - protein, 28 aa, Human influenza virus
KNGLYPNLSKSYANNKEKEVLVLWGVHH

SEQ ID NO: 3347 - protein, 29 aa, Human influenza virus
KKGNSYPKLSKSYTNNKGKEVLVIWGVHH

SEQ ID NO: 3348 - protein, 28 aa, Human influenza virus
KNGLYPNLSKSYANNKEKEVLVLWGVHH

SEQ ID NO: 3349 - protein, 29 aa, Human influenza virus
KKGNSYPKLSKSYTNNKGKEVLVIWGVHH

SEQ ID NO: 3350 - protein, 28 aa, Human influenza virus
KNGLYPNLSKSYANNKEKEVLVLWGVHH

SEQ ID NO: 3351 - protein, 29 aa, Human influenza virus
KKGNSYPKLSKSYTNNKGKEVLVIWGVHH

SEQ ID NO: 3352 - protein, 29 aa, Human influenza virus
KKGSSYPKLSKSYVNNKGKEVLVLWGVHH

SEQ ID NO: 3353 - protein, 28 aa, Human influenza virus
KNGLYPNLSKSYANNKEKEVLVLWGVHH

SEQ ID NO: 3354 - protein, 29 aa, Human influenza virus
KKGNSYPKLSKSYTNNKGKEVLVIWGVHH

SEQ ID NO: 3355 - protein, 28 aa, Human influenza virus
KNGLYPNLSKSYANNKEKEVLVLWGVHH

SEQ ID NO: 3356 - protein, 29 aa, Human influenza virus
KKGNSYPKLSKSYTNNKGKEVLVIWGVHH

SEQ ID NO: 3357 - protein, 28 aa, Human influenza virus
KNGLYPNLSKSYANNKEKEVLVLWGVHH

SEQ ID NO: 3358 - protein, 28 aa, Human influenza virus
KNGLYPNLSKSYANNKEKEVLVLWGVHH

SEQ ID NO: 3359 - protein, 29 aa, Human influenza virus
KKGNSYPKLSKSYTNNKGKEVLVIWGVHH

SEQ ID NO: 3360 - protein, 28 aa, Human influenza virus
KNGLYPNLSKSYANNKEKEVLILWGVHH

SEQ ID NO: 3361 - protein, 28 aa, Human influenza virus
KNGLYPNLSKSYANNKEKEVLVLWGVHH

SEQ ID NO: 3362 - protein, 28 aa, Human influenza virus
KNGLYPNLSKSYANNKEKEVLVLWGVHH

SEQ ID NO: 3363 - protein, 28 aa, Human influenza virus
KNGLYPNLSKSYANNKEKEVLVLWGVHH

SEQ ID NO: 3364 - protein, 28 aa, Human influenza virus
KNGLYPNLSKSYANNKEKEVLVLWGVHH

SEQ ID NO: 3365 - protein, 28 aa, Human influenza virus
KNGLYPNLSKSYANNKEKEVLVLWGVHH

SEQ ID NO: 3366 - protein, 29 aa, Human influenza virus
KKGNSYPKISKSYINNKEKEVLVLWGIHH

SEQ ID NO: 3367 - protein, 29 aa, Human influenza virus
KKGNSYPKLSKSYINNKKKEVLVIWGIHH

SEQ ID NO: 3368 - protein, 29 aa, Human influenza virus
KKGNSYPKLSKSYINNKGKKVLVLWGIHH

SEQ ID NO: 3369 - protein, 29 aa, Human influenza virus
KKGTSYPKLSKSYTNNKKKEVLVLWGVHH

SEQ ID NO: 3370 - protein, 28 aa, Human influenza virus
KNGLYPNLSKSYANNKEKEVLVLWGVHH

SEQ ID NO: 3371 - protein, 28 aa, Human influenza virus
KNGLYPNLSKSYANNKEKEVLILWGVHH

SEQ ID NO: 3372 - protein, 29 aa, Human influenza virus
KKGPNYPVAKRSYNNTSGEQMLIIWGVHH

SEQ ID NO: 3373 - protein, 28 aa, Human influenza virus
KKGNYPVAKRSYNNTSGEQMLIIWGIHH

SEQ ID NO: 3374 - protein, 29 aa, Human influenza virus
KKENSYPKLRKSIIINKKEVKLVIWGIHH

SEQ ID NO: 3375 - protein, 19 aa, Human influenza virus
KSYKNTRKDPALIIWGIHH

SEQ ID NO: 3376 - protein, 29 aa, Human influenza virus
KKNNAYPTIKRTYNNTNVEDLLILWGIHH

SEQ ID NO: 3377 - protein, 29 aa, Human influenza virus
KKNNAYPTIKRSYSNTNQEDLLVLWGIHH

SEQ ID NO: 3378 - protein, 29 aa, Human influenza virus
KKNNAYPTIKRTYNNTNIEDKKILWGIHH

SEQ ID NO: 3379 - protein, 29 aa, Human influenza virus
KKNNAYPTKIRTYNNTNMEDLLILWGIHH

SEQ ID NO: 3380 - protein, 29 aa, Human influenza virus
KKGNAYPTIKRTYNNTNVEDLLILWGIHH

SEQ ID NO: 3381 - protein, 29 aa, Human influenza virus
KKNNTYPTIKRSYNNTNQEDLLILWGIHH

SEQ ID NO: 3382 - protein, 29 aa, Human influenza virus
KKNSAYPTIKRSYNNTNQEDLLVLWGIHH

SEQ ID NO: 3383 - protein, 29 aa, Human influenza virus
KKNSAYPTIKRSYNNTNQEDLLVLWGIHH

SEQ ID NO: 3384 - protein, 29 aa, Human influenza virus
KKNSAYPTIKRSYNNTNQEDLLVLWGIHH

SEQ ID NO: 3385 - protein, 29 aa, Human influenza virus
KKNSAYPTIKRSYNNTNQEDLLVLWGIHH

SEQ ID NO: 3386 - protein, 29 aa, Human influenza virus
KKNSAYPTIKRSYNNTNQEDLLVLWGIHH

SEQ ID NO: 3387 - protein, 29 aa, Human influenza virus
KKNSAYPTIKRSYNNTNQEDLLVLWGIHH

SEQ ID NO: 3388 - protein, 29 aa, Human influenza virus
KKNNAYPTIKRSYNNTNQEDLLVLWGIHH

SEQ ID NO: 3389 - protein, 29 aa, Human influenza virus
KKNSTYPTIKRSYNNTNQEDLLVLWGIHH

SEQ ID NO: 3390 - protein, 29 aa, Human influenza virus
KKNSAYPTIKRSYNNTNQEDLLVLWGIHH

SEQ ID NO: 3391 - protein, 29 aa, Human influenza virus
KKNSTYPTIKRSYNNTNQEDLLVLWGIHH

SEQ ID NO: 3392 - protein, 29 aa, Human influenza virus
KKNSTYPTIKRSYNNTNQEDLLVLWGIHH

SEQ ID NO: 3393 - protein, 29 aa, Human influenza virus
KKNSTYPTIKRSYNNTNQEDLLVLWGIHH

SEQ ID NO: 3394 - protein, 29 aa, Human influenza virus
KKNSTYPTIKRSYNNTNQEDLLVLWGIHH

SEQ ID NO: 3395 - protein, 29 aa, Human influenza virus
KKNSTYPTIKRSYNNTNQEDLLVLWGIHH

SEQ ID NO: 3396 - protein, 29 aa, Human influenza virus
KKNNAYPTIKRSYNNTNQEDLLVLWGIHH

SEQ ID NO: 3397 - protein, 29 aa, Human influenza virus
KKNSTYPTIKRSYNNTNQEDLLVMWGIHH

SEQ ID NO: 3398 - protein, 29 aa, Human influenza virus
KKNSAYPTIKRSYNNTNQEDLLVLWGIHH

SEQ ID NO: 3399 - protein, 29 aa, Human influenza virus
KKNSTYPTIKRSYNNTNQEDLLVLWGIHH

SEQ ID NO: 3400 - protein, 29 aa, Human influenza virus
KKNSTYPTIKRSYNNTNQEDLLVLWGIHH

SEQ ID NO: 3401 - protein, 28 aa, Human influenza virus
KKNSTYPTIKRSYNNTQEDLLVLWGIGH

SEQ ID NO: 3402 - protein, 29 aa, Human influenza virus
KKNSAYPIIKRSYNNTNQEDLLVLWGIHH

SEQ ID NO: 3403 - protein, 29 aa, Human influenza virus
  MOD_RES (13)..(13): Variable amino acid
KKNSAYPTIKRSXNNTNHEDLLVLWGIHH

SEQ ID NO: 3404 - protein, 29 aa, Human influenza virus
KKNSAYPTIKRSYNNTNQEDLLVLWGIHH

SEQ ID NO: 3405 - protein, 29 aa, Human influenza virus
KKNNAYPTIKRSYNNTNQEDLLVLWGIHH

SEQ ID NO: 3406 - protein, 29 aa, Human influenza virus
KKNSTYPTIKRSYNNTNQEDLLVLWGIHH

SEQ ID NO: 3407 - protein, 29 aa, Human influenza virus
KKDNAYPTIKRSYNNTNQEDLLVLWGIHH

SEQ ID NO: 3408 - protein, 29 aa, Human influenza virus
KKNNTYPTIKRSYNNTNQEDLLILWGIHH

SEQ ID NO: 3409 - protein, 29 aa, Human influenza virus
KKNNTYPTIKKSYNNTNQEDLLVLWGIHH

SEQ ID NO: 3410 - protein, 29 aa, Human influenza virus
KKNSTYPTIKKSYNNTNQEDLLVLWGIHH

SEQ ID NO: 3411 - protein, 29 aa, Human influenza virus
KKNRTYPTIKKSYNNTNQEDLLVLWGIHH

SEQ ID NO: 3412 - protein, 29 aa, Human influenza virus
KKNNTYPTIKRSYNNTNQEDLLVLWGIHH

SEQ ID NO: 3413 - protein, 29 aa, Human influenza virus
KKNSTYPTIKESYNNTNQEDLLVLWGIHH

SEQ ID NO: 3414 - protein, 29 aa, Human influenza virus
KKDNAYPTIKRSYNNTNQEDLLVLWGIHH

SEQ ID NO: 3415 - protein, 29 aa, Human influenza virus
KKNDAYPTIKRSYNNTNQEDLLVLWGIHH

SEQ ID NO: 3416 - protein, 29 aa, Human influenza virus
KKDNAYPTIKRSYNNTNQEDLLVLWGIHH

SEQ ID NO: 3417 - protein, 29 aa, Human influenza virus
KKNDTYPTIKRSYNNTNQEDLLVLWGIHH

SEQ ID NO: 3418 - protein, 10 aa, Shrimp Taura Syndrome Virus
KVGSRRYKSH

SEQ ID NO: 3419 - protein, 13 aa, Shrimp Taura Syndrome Virus
HFATKCFGEVPKK

SEQ ID NO: 3420 - protein, 14 aa, Shrimp Taura Syndrome Virus
KAENEFWDGVKQSH

SEQ ID NO: 3421 - protein, 11 aa, Shrimp Taura Syndrome Virus
KGHRKVPCEQK

SEQ ID NO: 3422 - protein, 9 aa, Shrimp Taura Syndrome Virus
HRKVPCEQK

SEQ ID NO: 3423 - protein, 11 aa, Shrimp Taura Syndrome Virus
KVPCEQKIWLH

SEQ ID NO: 3424 - protein, 10 aa, Shrimp Taura Syndrome Virus
KIWLHQNPGK

SEQ ID NO: 3425 - protein, 12 aa, Shrimp Taura Syndrome Virus
HQNPGKTQQDMK

SEQ ID NO: 3426 - protein, 9 aa, Shrimp Taura Syndrome Virus
KGNTRVHVK

SEQ ID NO: 3427 - protein, 10 aa, Shrimp Taura Syndrome Virus
KEHVEKIVDK

SEQ ID NO: 3428 - protein, 10 aa, Shrimp Taura Syndrome Virus
HVEKIVDKAK

SEQ ID NO: 3429 - protein, 10 aa, Shrimp Taura Syndrome Virus
KVGSRRYKSH

SEQ ID NO: 3430 - protein, 13 aa, Shrimp Taura Syndrome Virus
HFATKCFGEVPKK

SEQ ID NO: 3431 - protein, 14 aa, Shrimp Taura Syndrome Virus
KAENEFWDGVKQSH

SEQ ID NO: 3432 - protein, 11 aa, Shrimp Taura Syndrome Virus
KGHRKVPCEQK

SEQ ID NO: 3433 - protein, 9 aa, Shrimp Taura Syndrome Virus
HRKVPCEQK

SEQ ID NO: 3434 - protein, 11 aa, Shrimp Taura Syndrome Virus
KVPCEQKIWLH

SEQ ID NO: 3435 - protein, 10 aa, Shrimp Taura Syndrome Virus
KIWLHQNPGK

SEQ ID NO: 3436 - protein, 12 aa, Shrimp Taura Syndrome Virus
HQNPGKTQQDMK

SEQ ID NO: 3437 - protein, 9 aa, Shrimp Taura Syndrome Virus
KGNTRVHVK

SEQ ID NO: 3438 - protein, 10 aa, Shrimp Taura Syndrome Virus
KEHVEKIVDK

SEQ ID NO: 3439 - protein, 10 aa, Shrimp Taura Syndrome Virus
HVEKIVDKAK

SEQ ID NO: 3440 - protein, 10 aa, Shrimp Taura Syndrome Virus
KVGSRRYKSH

SEQ ID NO: 3441 - protein, 13 aa, Shrimp Taura Syndrome Virus
HFATKCFGEVPKK

SEQ ID NO: 3442 - protein, 14 aa, Shrimp Taura Syndrome Virus
KAENEFWDGVKQSH

SEQ ID NO: 3443 - protein, 11 aa, Shrimp Taura Syndrome Virus
KGHRKVPCEQK

SEQ ID NO: 3444 - protein, 9 aa, Shrimp Taura Syndrome Virus
HRKVPCEQK

SEQ ID NO: 3445 - protein, 11 aa, Shrimp Taura Syndrome Virus
KVPCEQKIWLH

SEQ ID NO: 3446 - protein, 10 aa, Shrimp Taura Syndrome Virus
KIWLHQNPGK

SEQ ID NO: 3447 - protein, 12 aa, Shrimp Taura Syndrome Virus
HQNPGKTQQDMK

SEQ ID NO: 3448 - protein, 9 aa, Shrimp Taura Syndrome Virus
KGNTRVHVK

SEQ ID NO: 3449 - protein, 10 aa, Shrimp Taura Syndrome Virus
KEHVEKIVDK

SEQ ID NO: 3450 - protein, 10 aa, Shrimp Taura Syndrome Virus
HVEKIVDKAK

SEQ ID NO: 3451 - protein, 10 aa, Shrimp Taura Syndrome Virus
KVGSRRYKSH

SEQ ID NO: 3452 - protein, 13 aa, Shrimp Taura Syndrome Virus
HFATKCFGEVPKK

SEQ ID NO: 3453 - protein, 14 aa, Shrimp Taura Syndrome Virus
KAENEFWDGVKQSH

SEQ ID NO: 3454 - protein, 11 aa, Shrimp Taura Syndrome Virus
KGHRKVPCEQK

SEQ ID NO: 3455 - protein, 9 aa, Shrimp Taura Syndrome Virus
HRKVPCEQK

SEQ ID NO: 3456 - protein, 11 aa, Shrimp Taura Syndrome Virus
KVPCEQKIWLH

SEQ ID NO: 3457 - protein, 10 aa, Shrimp Taura Syndrome Virus
KIWLHQNPGK

SEQ ID NO: 3458 - protein, 12 aa, Shrimp Taura Syndrome Virus
HQNPGKTQQDMK

SEQ ID NO: 3459 - protein, 9 aa, Shrimp Taura Syndrome Virus
KGNTRVHVK

SEQ ID NO: 3460 - protein, 10 aa, Shrimp Taura Syndrome Virus
KEHVEKIVDK

SEQ ID NO: 3461 - protein, 10 aa, Shrimp Taura Syndrome Virus
HVEKIVDKAK

SEQ ID NO: 3462 - protein, 10 aa, Shrimp Taura Syndrome Virus
KVGSRRYKSH

SEQ ID NO: 3463 - protein, 13 aa, Shrimp Taura Syndrome Virus
HFATKCFGEVPKK

SEQ ID NO: 3464 - protein, 14 aa, Shrimp Taura Syndrome Virus
KAENEFWDGVKQSH

SEQ ID NO: 3465 - protein, 11 aa, Shrimp Taura Syndrome Virus
KGHRKVPCEQK

SEQ ID NO: 3466 - protein, 9 aa, Shrimp Taura Syndrome Virus
HRKVPCEQK

SEQ ID NO: 3467 - protein, 11 aa, Shrimp Taura Syndrome Virus
KVPCEQKIWLH

SEQ ID NO: 3468 - protein, 10 aa, Shrimp Taura Syndrome Virus
KIWLHQNPGK

SEQ ID NO: 3469 - protein, 12 aa, Shrimp Taura Syndrome Virus
HQNPGKTQQDMK

SEQ ID NO: 3470 - protein, 9 aa, Shrimp Taura Syndrome Virus
KGNTRVHVK

SEQ ID NO: 3471 - protein, 10 aa, Shrimp Taura Syndrome Virus
KEHVEKIVDK

SEQ ID NO: 3472 - protein, 10 aa, Shrimp Taura Syndrome Virus
HVEKIVDKAK

SEQ ID NO: 3473 - protein, 29 aa, Goose influenza virus
KKGTSYPKLSKSYTNNKGKEVLVLWGVHH

SEQ ID NO: 3474 - protein, 29 aa, Human influenza virus
KKGTSYPKLSKSYTNNKGKEVLVLWGVHH

SEQ ID NO: 3475 - protein, 29 aa, Human influenza virus
KKENSYPKLSKSYVNNKGKEVLVLWGVHH

SEQ ID NO: 3476 - protein, 29 aa, Human influenza virus
KKENSYPKLSKSYVNNKGKEVLVLWGVHH

SEQ ID NO: 3477 - protein, 29 aa, Human influenza virus
KKGTSYPKLSKSYTNNKGKEVLVLWGVHH

SEQ ID NO: 3478 - protein, 29 aa, Human influenza virus
KKGTSYPKLSKSYTNNKGKEVLVLWGVHH

SEQ ID NO: 3479 - protein, 29 aa, Human influenza virus
KKGNSYPKLSKSYTNNKGKEVLVIWGVHH

SEQ ID NO: 3480 - protein, 29 aa, Human influenza virus
KKGNSYPKLSKSYTNNKGKEVLVIWGVHH

SEQ ID NO: 3481 - protein, 29 aa, Human influenza virus
KKGTSYPKLSKSYTNNKGKEVLVLWGVHH

SEQ ID NO: 3482 - protein, 29 aa, Human influenza virus
KKGNSYPKLSKSYTNNKGKEVLVIWGVHH

SEQ ID NO: 3483 - protein, 29 aa, Human influenza virus
KKGTSYPKLSKSYTNNKGKEVLVLWGVHH

SEQ ID NO: 3484 - protein, 29 aa, Human influenza virus
KKGTSYPKLSKSYTNNKGKEVLVLWGVHH

SEQ ID NO: 3485 - protein, 29 aa, Human influenza virus
KKGNSYPKLSKSYTNNKGKEVLVIWGVHH

SEQ ID NO: 3486 - protein, 29 aa, Human influenza virus
KKGNSYPKLSKSYTNNKGKEVLVIWGVHH

SEQ ID NO: 3487 - protein, 29 aa, Human influenza virus
KKGNSYPKLSKSYTNNKGKEVLVIWGVHH

SEQ ID NO: 3488 - protein, 29 aa, Human influenza virus
KKGDSYPKLSKSYTNNKGKEVLVIWGVHH

SEQ ID NO: 3489 - protein, 29 aa, Human influenza virus
KKGSSYPKLSKSYVNNKGKEVLVLWGVHH

SEQ ID NO: 3490 - protein, 29 aa, Human influenza virus
KKGSSYPKLSKSYVNNKGKEVLVLWGVHH

SEQ ID NO: 3491 - protein, 29 aa, Human influenza virus
KKGNSYPKLSKSYTNNKGKEVLVIWGVHH

SEQ ID NO: 3492 - protein, 29 aa, Human influenza virus
KKGNSYPKLSKSYTNNKGKEVLVIWGVHH

SEQ ID NO: 3493 - protein, 29 aa, Human influenza virus
KKGNSYPKLSKSYTNNKGKEVLVIWGVHH

SEQ ID NO: 3494 - protein, 29 aa, Human influenza virus
KKGNSYPKLSKSYTNNKGKEVLVIWGVHH

SEQ ID NO: 3495 - protein, 29 aa, Human influenza virus
KKGNSYPKISKSYINNKEKEVLVLWGIHH

SEQ ID NO: 3496 - protein, 29 aa, Human influenza virus
KKGNSYPKLSKSYINNKKKEVLVIWGIHH

SEQ ID NO: 3497 - protein, 29 aa, Human influenza virus
KKGNSYPKLSKSYINNKGKKVLVLWGIHH

SEQ ID NO: 3498 - protein, 29 aa, Human influenza virus
KKGTSYPKLSKSYTNNKKKEVLVLWGVHH

SEQ ID NO: 3499 - protein, 28 aa, Human influenza virus
KNGLYPNLSKSYANNKEKEVLVLWGVHH

SEQ ID NO: 3500 - protein, 28 aa, Human influenza virus
KNGLYPNLSKSYANNKEKEVLILWGVHH

SEQ ID NO: 3501 - protein, 29 aa, Human influenza virus
KKGPNYPVAKRSYNNTSGEQMLIIWGVHH

SEQ ID NO: 3502 - protein, 29 aa, Human influenza virus
KKGPNYPVAKRSYNNTSGEQMLIIWGIHH

SEQ ID NO: 3503 - protein, 29 aa, Human influenza virus
KKENSYPKLRKSIIINKKEVKLVIWGIHH

SEQ ID NO: 3504 - protein, 19 aa, Human influenza virus
KSYKNTRKDPALIIWGIHH

SEQ ID NO: 3505 - protein, 29 aa, Human influenza virus
KKNNAYPTIKRTYNNTNVEDLLILWGIHH

SEQ ID NO: 3506 - protein, 29 aa, Human influenza virus
KKNNAYPTIKRSYSNTNQEDLLVLWGIHH

SEQ ID NO: 3507 - protein, 29 aa, Human influenza virus
KKNNAYPTIKRTYNNTNIEDLLILWGIHH

SEQ ID NO: 3508 - protein, 29 aa, Human influenza virus
KKNNAYPTIKRTYNNTNMEDLLILWGIHH

SEQ ID NO: 3509 - protein, 29 aa, Human influenza virus
KKGNAYPTIKRTYNNTNVEDLLILWGIHH

SEQ ID NO: 3510 - protein, 29 aa, Human influenza virus
KKNNTYPTIKRSYNNTNQEDLLILWGIHH

SEQ ID NO: 3511 - protein, 29 aa, Human influenza virus
KKNSAYPTIKRSYNNTNQEDLLVLWGIHH

SEQ ID NO: 3512 - protein, 29 aa, Human influenza virus
KKNSAYPTIKRSYNNTNQEDLLVLWGIHH

SEQ ID NO: 3513 - protein, 29 aa, Human influenza virus
KKNSAYPTIKRSYNNTNQEDLLVLWGIHH

SEQ ID NO: 3514 - protein, 29 aa, Human influenza virus
KKNSAYPTIKRSYNNTNQEDLLVLWGIHH

SEQ ID NO: 3515 - protein, 29 aa, Human influenza virus
KKNSAYPTIKRSYNNTNQEDLLVLWGIHH

SEQ ID NO: 3516 - protein, 29 aa, Human influenza virus
KKNSAYPTIKRSYNNTNQEDLLVLWGIHH

SEQ ID NO: 3517 - protein, 29 aa, Human influenza virus
KKNNAYPTIKRSYNNTNQEDLLVLWGIHH

SEQ ID NO: 3518 - protein, 29 aa, Human influenza virus
KKNSAYPTIKRSYNNTNQEDLLVLWGIHH

SEQ ID NO: 3519 - protein, 29 aa, Human influenza virus
KKNSTYPTIKRSYNNTNQEDLLVLWGIHH

SEQ ID NO: 3520 - protein, 29 aa, Human influenza virus
KKNSTYPTIKRSYNNTNQEDLLVLWGIHH

SEQ ID NO: 3521 - protein, 29 aa, Human influenza virus
KKNSTYPTIKRSYNNTNQEDLLVLWGIHH

SEQ ID NO: 3522 - protein, 29 aa, Human influenza virus
KKNSTYPTIKRSYNNTNQEDLLVLWGIHH

SEQ ID NO: 3523 - protein, 29 aa, Human influenza virus
KKNSTYPTIKRSYNNTNQEDLLVLWGIHH

SEQ ID NO: 3524 - protein, 29 aa, Human influenza virus
KKNNAYPTIKRSYNNTNQEDLLVLWGIHH

SEQ ID NO: 3525 - protein, 29 aa, Human influenza virus
KKNSTYPTIKRSYNNTNQEDLLVMWGIHH

SEQ ID NO: 3526 - protein, 29 aa, Human influenza virus
KKNSAYPTIKRSYNNTNQEDLLVLWGIHH

SEQ ID NO: 3527 - protein, 29 aa, Human influenza virus
KKNSTYPTIKRSYNNTNQEDLLVLWGIHH

SEQ ID NO: 3528 - protein, 29 aa, Human influenza virus
KKNSTYPTIKRSYNNTNQEDLLVLWGIHH

SEQ ID NO: 3529 - protein, 29 aa, Human influenza virus
KKNSTYPTIKRSYNNTNQEDLLVLWGIQH

SEQ ID NO: 3530 - protein, 29 aa, Human influenza virus
KKNSAYPIIKRSYNNTNQEDLLVLWGIHH

SEQ ID NO: 3531 - protein, 29 aa, Goose influenza virus
  MOD_RES (13)..(13): Variable amino acid
KKNSAYPTIKRSXNNTNHEDLLVLWGIHH

SEQ ID NO: 3532 - protein, 29 aa, Human influenza virus
KKNSAYPTIKRSYNNTNQEDLLVLWGIHH

SEQ ID NO: 3533 - protein, 29 aa, Turkey  influenza virus
KKNNAYPTIKRSYNNTNQEDLLVLWGIHH

SEQ ID NO: 3534 - protein, 29 aa, Human influenza virus
KKNNTYPTIKKSYNNTNQEDLLVLWGIHH

SEQ ID NO: 3535 - protein, 29 aa, Human influenza virus
KKNNTYPTIKKSYNNTNQEDLLVLWGIHH

SEQ ID NO: 3536 - protein, 29 aa, Goose Influenza virus
KKGTSYPKLSKSYTNNKGKEVLVLWGVHH

SEQ ID NO: 3537 - protein, 29 aa, Pig Influenza virus
KKGNSYPKLSKSYTNNKGKEVLVIWGVHH

SEQ ID NO: 3538 - protein, 29 aa, Shrimp White Spot Syndrome Virus
KKNVKSAKQLPHLKVLKKLDVRGAKQLPH

SEQ ID NO: 3539 - protein, 28 aa, Shrimp White Spot Syndrome Virus
KVHLDVKGVKQLLHLKVRLDVRGAKQLH

SEQ ID NO: 3540 - protein, 29 aa, Human influenza virus
KKENSYPKLRKSIIINKKEVKLVIWGIHH

SEQ ID NO: 3541 - protein, 19 aa, Human influenza virus
KSYKNTRKDPALIIWGIHH

SEQ ID NO: 3542 - protein, 19 aa, Human influenza virus
KSYKNTRKDPALIIWGIHH

SEQ ID NO: 3543 - protein, 29 aa, Human influenza virus
KKGPNYPVAKRSYNNTSGEQMLIIWGVHH

SEQ ID NO: 3544 - protein, 29 aa, Human influenza virus
KKGPNYPVAKRSYNNTSGEQMLIIWGIHH

SEQ ID NO: 3545 - protein, 29 aa, Human influenza virus
KKNNAYPTIKRTYNNTNVEDLLILWGIHH

SEQ ID NO: 3546 - protein, 29 aa, Human influenza virus
KKNNAYPTIKRSYSNTNQEDLLVLWGIHH

SEQ ID NO: 3547 - protein, 32 aa, Shrimp Taura syndrome virus; identical to SEQ ID NO: 661

SEQ ID NO: 3548 - protein, 33 aa, Shrimp Taura syndrome virus; identical to SEQ ID NO: 662

SEQ ID NO: 3549 - protein, 10 aa, Shrimp Taura syndrome virus
KVGSRRYKSH

SEQ ID NO: 3550 - protein, 13 aa, Shrimp Taura syndrome virus
HFATKCFGEVPKK

SEQ ID NO: 3551 - protein, 14 aa, Shrimp Taura syndrome virus
KAENEFWDGVKQSH

SEQ ID NO: 3552 - protein, 11 aa, Shrimp Taura syndrome virus
KGHRKVPCEQK

SEQ ID NO: 3553 - protein, 9 aa, Shrimp Taura syndrome virus
HRKVPCEQK

SEQ ID NO: 3554 - protein, 11 aa, Shrimp Taura syndrome virus
KVPCEQKIWLH

SEQ ID NO: 3555 - protein, 10 aa, Shrimp Taura syndrome virus
KIWLHQNPGK

SEQ ID NO: 3556 - protein, 12 aa, Shrimp Taura syndrome virus
HQNPGKTQQDMK

SEQ ID NO: 3557 - protein, 9 aa, Shrimp Taura syndrome virus
KGNTRVHVK

SEQ ID NO: 3558 - protein, 10 aa, Shrimp Taura syndrome virus
KEHVEKIVDK

SEQ ID NO: 3559 - protein, 10 aa, Shrimp Taura syndrome virus
HVEKIVDKAK

SEQ ID NO: 3560 - protein, 29 aa, Human influenza virus
KKGSSYPKLSKSYVNNKGKEVLVLWGVHH

SEQ ID NO: 3561 - protein, 28 aa, Human influenza virus
KGSSYPKLSKSYVNNKGKEVLVLWGVHH

SEQ ID NO: 3562 - protein, 28 aa, Shrimp White Spot Syndrome Virus
KVHLDVKGVKQLLHLKVRLDVRGAKQLH

SEQ ID NO: 3563 - protein, 29 aa, Shrimp White Spot Syndrome Virus
KKNVKSAKQLPHLKVLKKLDVRGAKQLPH

SEQ ID NO: 3564 - protein, 32 aa, Shrimp Taura syndrome virus; identical to SEQ ID NO: 661

SEQ ID NO: 3565 - protein, 33 aa, Shrimp Taura syndrome virus; identical to SEQ ID NO: 662

SEQ ID NO: 3566 - protein, 1011 aa, Shrimp Taura Syndrome Virus
MPANPVEIDNFDTTTSGGLIPGGSVTNSEGSTILMNDIPITNQNVVLSKNVTDNLFEVQDQALIESLSRDVLLHNDSWTSSDDEIGTTMTQEQLATEFNQPHLYEISLPDDIVRKSLFMSNKLANIAYMRCDYEVTVRVQATPFLQGALWLWNKMNAKQTSIIRRTLTEHLRSITSFPGIEMNLQSEARAITLSIPYTSEFQVFNPRNVNNLNSIRLSVLSQLQGPEDVESASYSIYGRLKNIKLYGHAPSVTSSVYPSTQSGYDDDCPIVHAGTDEDSSKQGIVSRVADTVGAVANVVDGVGVPILSTIAKPVSWVSGVVSNVASMFGFSKDRDMTKVNAYENLPGKGFTHGVGFDYGVPLSLFPNNAIDPTIAVPEGLDEMSIEYLAQRPYMLNRYTIRGGDTPDVHGTIVADIPVSPVNFSLYGKVIAKYRTLFAAPVSLAVAMANWWRGNINLNLRFAKTQYHQCRLLVQYLPYGSGVQPIESILSQIIDISQVDDKGIDIAFPSVYPNKWMRVYDPAKVGYTADCAPGRIVISVLNPLISASTVSPNIVMYPWVHWSNLEVAEPGTLAKAAIGFNYPADVPEEPTFSVTRAPVSGTLFTLLQDTKVSLGEADGVFSLYFTNTTTGRRHRLTYAGLPGELGSCEIVKLPQGQYSIEYAATSAPTLVLDRPIFSEPIGPKYVVTKVKNGDVVSISEETLVTCGSMAALGGATVALQSVDETIEILKLESDFESKAPVKFTPGNYTVVTEASDVELVTNQDITVNEHNPRTHAGIDEEPPVKRSVIGRIVRRVARYVPNKLIRRILRDLSQSPCIYPSTHAGLDYSSSDTSTMLTTMGEQFVSLRMLTRRSSPVDILRGDLVTLPGISFGTDNSLRQSLVNIISYMYRFTHGSISYKIIPKNKGDLYITTTSPDSIETSTSAYQFDTNRAMHYINTSLNPMAQISLPYYSPAENLVIDSKSFPQLSDLSISNLERTENEYFVLASAGDDHTFSQLAGCPAFTFGPAELA

SEQ ID NO: 3567 - protein, 21 aa, Shrimp Taura Syndrome Virus
HLYEISLPDDIVRKSLFMSNK

SEQ ID NO: 3568 - protein, 21 aa, Shrimp Taura Syndrome Virus
KDRDMTKVNAYENLPGKGFTH

SEQ ID NO: 3569 - protein, 15 aa, Shrimp Taura Syndrome Virus
KVNAYENLPGKGFTH

SEQ ID NO: 3570 - protein, 46 aa, Shrimp Taura Syndrome Virus
KLESDFESKAPVKFTPGNYTVVTEASDVELVTNQDITVNEHNPRTH

SEQ ID NO: 3571 - protein, 41 aa, Shrimp Taura Syndrome Virus
KLESDFESKAPVKFTPGNYTVVTEASDVELVTNQDITVNEH

SEQ ID NO: 3572 - protein, 13 aa, Shrimp Taura Syndrome Virus
HGSISYKIIPKNK

SEQ ID NO: 3573 - protein, 36 aa, Shrimp Taura Syndrome Virus
KIIPKNKGDLYITTTSPDSIETSTSAYQFDTNRAMH

SEQ ID NO: 3574 - protein, 2107 aa, Shrimp Taura Syndrome Virus
MASYYLNIKTHNLRRTPGAHRAFYVMNDDGENRIYSLIGTLRRAPAFKVGSRRYKSHIPYRRKATVAELCNQLHDRVLPFANPQVWKEVISENKVQPDSMLKAAFGNWEEWPKDKVCEELYSECECGYVGTCYVSVDWLRPQATKCNDCILKMNRNVEYPYHTIGVSGNVVTNTDIVYTGYADVFKCEKCDLLMGAWAPNDIPALTHNIRSSQCVQFKLPTENLAARNYVLLCEEIERENIPVIFQDYSEGNVFTCRIVSGDLTAVGTASNMYTARDVASKSLLDQLHNTPNVHMHSLHSLPYENFPCEALEFAVEQGIIPPVTFDEVFANDEYVITISCSLLVVSDVGPTQAVARERAAKRFLKMYDYSASYPSTHMFTLSTLPQRSGETLELANATLNHVNNVIDRHDEAISNVRQNVEVKLTDVSRQVGAMLPKVETVIDDVSSTLSSFRGVLDKISAWMPSSNPKIIDLIKETFVSLFFAILTKSLYPIIQGISSYALRNNLMANHLTALSEWLMTLEYDSPDEEEMPSTHGFMDDLTSRLPGLNGAKVQAATIYESIGTGLCVALSGILSFIAVMCLGITDLSAVTFNKLLTQSSLVGRALVGVRSFKDVFFGIWDYVDNQVCEILYGKSRKNLDLLKEYPSLDSLLSIFNYFHDTVDANVLISCNRAACELLVKADNLYQGYLDKSITLMHREISSRLKEARNSVKDLIAKAQVYLTCGDGSRVPPVVVYMYGDAGCGKTELSMALQDHFATKYFGEVPKKDVIYSRKAENEFWDGVKQSHKIIAYDDVLQIVDSAQKPNPELFEFIRLNNSDPYQVHMSSVSDKANTFIAPSFVFATSNVNPGTYVPKSIHSADAFRRRLDLCVYVDVKDEFARIVAGSKGHRKVPCEQKIWLHQNPGKTQHDMKHEIVAGTYKITPETAVYELHVDTTLAGDAQSKVCAYDGLVSLIEQVRRLRVAAHSDKVETDVPVLPTRLHELSQETFPNTHAGVGFQFATDWLGDFDRPVEALSYLNKTLEAHFVSRSANDGSMFIPASEVADLLCQRHNNTNLNEELVYLTWMTQITDKELASSLVYFTNNGMDKSIWKKSAERSAQAISQCKNAWTRINDFLKNHWISISAVIGSALLIGGVSSAVKCATKCRVRKILQDGGSIMQLVGVRSCMYACQLCKRIKNCDLRLRVRNRSEGVTTFVPGDVRRVARHVISAADVCEVPVHHSFIQSLCDEAFTVHSDKEETFSILDFTPEAKGRNPPESAVVESHQDYRVKAAVVESHQDFKPKDAIVESTIDTVFTESHQDVRVKLHPQIESHQDFRAKNPIVESRKPDYQVEWTDLRTESSNDRNAQDISNRILSRNFVRLYVPGSSLYTHGLFAYGRMLLMPKHMFDMLNGSVEIVSIADKGNTRVHVKIQSHKTVTRGGYEVDIVICEMGNSISARKDITSYFPTVKELPGLTGMMSSGRMRVFSTAKFKASDSCSYLMPQDFVAKYIAAVDHITSKSPEKKSYFIRQGFEAESDSMQGDCCSPYVLFNSASRAKIVGLHCAGFDGTARVFAQIITQEDIMAATPTTHAGRVTTEFPHTSLRDSPLPNSMAIGSVKTAPNPTKSEITRSPIHGCFPVRTAPATLYSPTENLLIKNAMKVTKNVELLEEDLIDACVHDVKRILNAPGVSDVEKRVLTHEESITGIENRQYMNALNRSTSAGFPYSSRKAKGKSGKQTWLGSEEFIVDNPDLKEHVEKIVDKAKDGIVDVSLGIFAATLKDERRPLEKVQANKTRVFAASNQGLALALRRYYLSFLDHVMTNRIDNEIGLGVNVYSYDWTRIVNKLKRVGDKVIAGDFSNFDGSLNSQILSRVSEIVTDWYGDDAENGLIRHTLLEYLFNATWLMNGKVFQLNHSQPSGNPLTTLINCVYNMIIFRYVYLLAQRENGFPMTLSGFTTNVACIFYGDDSLCSVSDKVSEWFNQHVITRLMAATGHEYTDETKSGSPPPYRSLNEVTFLKREFVLRDHFWIAPLSRNTIEDMCMWSRKNIDAQDALLQTTRIASFEASLHEKNYFLMFCDVIKKACRNAGYKEACLHELDCKSFLLAQQGRAGAHDSEFLSQLLDLN

SEQ ID NO: 3575 - protein, 44 aa, Shrimp Taura Syndrome Virus
HRAFYVMNDDGENRIYSLIGTLRRAPAFKVGSRRYKSHIPYRRK

SEQ ID NO: 3576 - protein, 10 aa, Shrimp Taura Syndrome Virus
KVGSRRYKSH

SEQ ID NO: 3577 - protein, 27 aa, Shrimp Taura Syndrome Virus
KVGSRRYKSHIPYRRKATVAELCNQLH

SEQ ID NO: 3578 - protein, 9 aa, Shrimp Taura Syndrome Virus
KSHIPYRRK

SEQ ID NO: 3579 - protein, 20 aa, Shrimp Taura Syndrome Virus
KSHIPYRRKATVAELCNQLH

SEQ ID NO: 3580 - protein, 38 aa, Shrimp Taura Syndrome Virus
HIPYRRKATVAELCNQLHDRVLPFANPQVWKEVISENK

SEQ ID NO: 3581 - protein, 46 aa, Shrimp Taura Syndrome Virus
HIPYRRKATVAELCNQLHDRVLPFANPQVWKEVISENKVQPDSMLK

SEQ ID NO: 3582 - protein, 29 aa, Shrimp Taura Syndrome Virus
HDRVLPFANPQVWKEVISENKVQPDSMLK

SEQ ID NO: 3583 - protein, 21 aa, Shrimp Taura Syndrome Virus
HDRVLPFANPQVWKEVISENK

SEQ ID NO: 3584 - protein, 18 aa, Shrimp Taura Syndrome Virus
KCNDCILKMNRNVEYPYH

SEQ ID NO: 3585 - protein, 42 aa, Shrimp Taura Syndrome Virus
KIIDLIKETFVSLFFAILTKSLYPIIQGISSYALRNNLMANH

SEQ ID NO: 3586 - protein, 26 aa, Shrimp Taura Syndrome Virus
KSRKNLDLLKEYPSLDSLLSIFNYFH

SEQ ID NO: 3587 - protein, 23 aa, Shrimp Taura Syndrome Virus
KNLDLLKEYPSLDSLLSIFNYFH

SEQ ID NO: 3588 - protein, 16 aa, Shrimp Taura Syndrome Virus
HREISSRLKEARNSVK

SEQ ID NO: 3589 - protein, 51 aa, Shrimp Taura Syndrome Virus
KEARNSVKDLIAKAQVYLTCGDGSRVPPVVVYMYGDAGCGKTELSMALQDH

SEQ ID NO: 3590 - protein, 12 aa, Shrimp Taura Syndrome Virus
HFATKYFGEVPK

SEQ ID NO: 3591 - protein, 13 aa, Shrimp Taura Syndrome Virus
HFATKYFGEVPKK

SEQ ID NO: 3592 - protein, 20 aa, Shrimp Taura Syndrome Virus
HFATKYFGEVPKKDVIYSRK

SEQ ID NO: 3593 - protein, 30 aa, Shrimp Taura Syndrome Virus
HFATKYFGEVPKKDVIYSRKAENEFWDGVK

SEQ ID NO: 3594 - protein, 29 aa, Shrimp Taura Syndrome Virus
KYFGEVPKKDVIYSRKAENEFWDGVKQSH

SEQ ID NO: 3595 - protein, 22 aa, Shrimp Taura Syndrome Virus
KKDVIYSRKAENEFWDGVKQSH

SEQ ID NO: 3596 - protein, 21 aa, Shrimp Taura Syndrome Virus
KDVIYSRKAENEFWDGVKQSH

SEQ ID NO: 3597 - protein, 14 aa, Shrimp Taura Syndrome Virus
KAENEFWDGVKQSH

SEQ ID NO: 3598 - protein, 51 aa, Shrimp Taura Syndrome Virus
KAENEFWDGVKQSHKIIAYDDVLQIVDSAQKPNPELFEFIRLNNSDPYQVH

SEQ ID NO: 3599 - protein, 49 aa, Shrimp Taura Syndrome Virus
HSADAFRRRLDLCVYVDVKDEFARIVAGSKGHRKVPCEQKIWLHQNPGK

SEQ ID NO: 3600 - protein, 40 aa, Shrimp Taura Syndrome Virus
HSADAFRRRLDLCVYVDVKDEFARIVAGSKGHRKVPCEQK

SEQ ID NO: 3601 - protein, 46 aa, Shrimp Taura Syndrome Virus
KGHRKVPCEQKIWLHQNPGKTQHDMKHEIVAGTYKITPETAVYELH

SEQ ID NO: 3602 - protein, 15 aa, Shrimp Taura Syndrome Virus
KGHRKVPCEQKIWLH

SEQ ID NO: 3603 - protein, 11 aa, Shrimp Taura Syndrome Virus
KGHRKVPCEQK

SEQ ID NO: 3604 - protein, 23 aa, Shrimp Taura Syndrome Virus
KGHRKVPCEQKIWLHQNPGKTQH

SEQ ID NO: 3605 - protein, 27 aa, Shrimp Taura Syndrome Virus
KGHRKVPCEQKIWLHQNPGKTQHDMKH

SEQ ID NO: 3606 - protein, 33 aa, Shrimp Taura Syndrome Virus
HRKVPCEQKIWLHQNPGKTQHDMKHEIVAGTYK

SEQ ID NO: 3607 - protein, 18 aa, Shrimp Taura Syndrome Virus
HRKVPCEQKIWLHQNPGK

SEQ ID NO: 3608 - protein, 9 aa, Shrimp Taura Syndrome Virus
HRKVPCEQK

SEQ ID NO: 3609 - protein, 24 aa, Shrimp Taura Syndrome Virus
HRKVPCEQKIWLHQNPGKTQHDMK

SEQ ID NO: 3610 - protein, 11 aa, Shrimp Taura Syndrome Virus
KVPCEQKIWLH

SEQ ID NO: 3611 - protein, 19 aa, Shrimp Taura Syndrome Virus
KVPCEQKIWLHQNPGKTQH

SEQ ID NO: 3612 - protein, 23 aa, Shrimp Taura Syndrome Virus
KVPCEQKIWLHQNPGKTQHDMKH

SEQ ID NO: 3613 - protein, 42 aa, Shrimp Taura Syndrome Virus
KVPCEQKIWLHQNPGKTQHDMKHEIVAGTYKITPETAVYELH

SEQ ID NO: 3614 - protein, 10 aa, Shrimp Taura Syndrome Virus
KIWLHQNPGK

SEQ ID NO: 3615 - protein, 13 aa, Shrimp Taura Syndrome Virus
KIWLHQNPGKTQH

SEQ ID NO: 3616 - protein, 17 aa, Shrimp Taura Syndrome Virus
KIWLHQNPGKTQHDMKH

SEQ ID NO: 3617 - protein, 36 aa, Shrimp Taura Syndrome Virus
KIWLHQNPGKTQHDMKHEIVAGTYKITPETAVYELH

SEQ ID NO: 3618 - protein, 12 aa, Shrimp Taura Syndrome Virus
HQNPGKTQHDMK

SEQ ID NO: 3619 - protein, 21 aa, Shrimp Taura Syndrome Virus
HQNPGKTQHDMKHEIVAGTYK

SEQ ID NO: 3620 - protein, 7 aa, Shrimp Taura Syndrome Virus
KTQHDMK

SEQ ID NO: 3621 - protein, 8 aa, Shrimp Taura Syndrome Virus
KTQHDMKH

SEQ ID NO: 3622 - protein, 27 aa, Shrimp Taura Syndrome Virus
KTQHDMKHEIVAGTYKITPETAVYELH

SEQ ID NO: 3623 - protein, 13 aa, Shrimp Taura Syndrome Virus
HDMKHEIVAGTYK

SEQ ID NO: 3624 - protein, 10 aa, Shrimp Taura Syndrome Virus
KHEIVAGTYK

SEQ ID NO: 3625 - protein, 21 aa, Shrimp Taura Syndrome Virus
KHEIVAGTYKITPETAVYELH

SEQ ID NO: 3626 - protein, 32 aa, Shrimp Taura Syndrome Virus
HWISISAVIGSALLIGGVSSAVKCATKCRVRK

SEQ ID NO: 3627 - protein, 51 aa, Shrimp Taura Syndrome Virus
HQDFKPKDAIVESTIDTVFTESHQDVRVKLHPQIESHQDFRAKNPIVESRK

SEQ ID NO: 3628 - protein, 29 aa, Shrimp Taura Syndrome Virus
HQDVRVKLHPQIESHQDFRAKNPIVESRK

SEQ ID NO: 3629 - protein, 21 aa, Shrimp Taura Syndrome Virus
HPQIESHQDFRAKNPIVESRK

SEQ ID NO: 3630 - protein, 15 aa, Shrimp Taura Syndrome Virus
HQDFRAKNPIVESRK

SEQ ID NO: 3631 - protein, 40 aa, Shrimp Taura Syndrome Virus
HGLFAYGRMLLMPKHMFDMLNGSVEIVSIADKGNTRVHVK

SEQ ID NO: 3632 - protein, 26 aa, Shrimp Taura Syndrome Virus
HMFDMLNGSVEIVSIADKGNTRVHVK

SEQ ID NO: 3633 - protein, 9 aa, Shrimp Taura Syndrome Virus
KGNTRVHVK

SEQ ID NO: 3634 - protein, 13 aa, Shrimp Taura Syndrome Virus
KGNTRVHVKIQSH

SEQ ID NO: 3635 - protein, 42 aa, Shrimp Taura Syndrome Virus
HVKIQSHKTVTRGGYEVDIVICEMGNSISARKDITSYFPTVK

SEQ ID NO: 3636 - protein, 36 aa, Shrimp Taura Syndrome Virus
HKTVTRGGYEVDIVICEMGNSISARKDITSYFPTVK

SEQ ID NO: 3637 - protein, 26 aa, Shrimp Taura Syndrome Virus
HTSLRDSPLPNSMAIGSVKTAPNPTK

SEQ ID NO: 3638 - protein, 17 aa, Shrimp Taura Syndrome Virus
KTAPNPTKSEITRSPIH

SEQ ID NO: 3639 - protein, 30 aa, Shrimp Taura Syndrome Virus
HGCFPVRTAPATLYSPTENLLIKNAMKVTK

SEQ ID NO: 3640 - protein, 23 aa, Shrimp Taura Syndrome Virus
KNAMKVTKNVELLEEDLIDACVH

SEQ ID NO: 3641 - protein, 44 aa, Shrimp Taura Syndrome Virus
KNAMKVTKNVELLEEDLIDACVHDVKRILNAPGVSDVEKRVLTH

SEQ ID NO: 3642 - protein, 38 aa, Shrimp Taura Syndrome Virus
HEESITGIENRQYMNALNRSTSAGFPYSSRKAKGKSGK

SEQ ID NO: 3643 - protein, 27 aa, Shrimp Taura Syndrome Virus
KAKGKSGKQTWLGSEEFIVDNPDLKEH

SEQ ID NO: 3644 - protein, 10 aa, Shrimp Taura Syndrome Virus
KEHVEKIVDK

SEQ ID NO: 3645 - protein, 34 aa, Shrimp Taura Syndrome Virus
HVEKIVDKAKDGIVDVSLGIFAATLKDERRPLEK

SEQ ID NO: 3646 - protein, 10 aa, Shrimp Taura Syndrome Virus
HVEKIVDKAK

SEQ ID NO: 3647 - protein, 39 aa, Shrimp Taura Syndrome Virus
KDERRPLEKVQANKTRVFAASNQGLALALRRYYLSFLDH

SEQ ID NO: 3648 - protein, 35 aa, Shrimp Taura Syndrome Virus
HVMTNRIDNEIGLGVNVYSYDWTRIVNKLKRVGDK

SEQ ID NO: 3649 - protein, 48 aa, Shrimp Taura Syndrome Virus
KLKRVGDKVIAGDFSNFDGSLNSQILSRVSEIVTDWYGDDAENGLIRH

SEQ ID NO: 3650 - protein, 23 aa, Shrimp Taura Syndrome Virus
HEKNYFLMFCDVIKKACRNAGYK

SEQ ID NO: 3651 - protein, 33 aa, Shrimp Taura Syndrome Virus
HEKNYFLMFCDVIKKACRNAGYKEACLHELDCK

SEQ ID NO: 3652 - protein, 15 aa, Shrimp Taura Syndrome Virus
KKACRNAGYKEACLH

SEQ ID NO: 3653 - protein, 33 aa, Shrimp Taura Syndrome Virus; identical to SEQ ID NO: 662

SEQ ID NO: 3654 - protein, 32 aa, Shrimp Taura Syndrome Virus
KACRNAGYKEACLHELDCKSFLLAQQGRAGAH

SEQ ID NO: 3655 - protein, 14 aa, Shrimp Taura Syndrome Virus
KACRNAGYKEACLH

SEQ ID NO: 3656 - protein, 11 aa, Shrimp Taura Syndrome Virus
KEACLHELDCK

SEQ ID NO: 3657 - protein, 24 aa, Shrimp Taura Syndrome Virus
KEACLHELDCKSFLLAQQGRAGAH

SEQ ID NO: 3658 - protein, 10 aa, Homo sapiens
KAGVAFLHKK

SEQ ID NO: 3659 - protein, 87 aa, Tobacco Mosaic Virus
HHSKHHATYVKGANDAVAKLEEARAKEDHSAILLNEKNLAFNLAGHVNHTIWWKNLSPNGGDKPTGELAAAIADAFGSFDKFRAQFH

SEQ ID NO: 3660 - protein, 151 aa, Plasmodium falciparum
HGAGYSAPYGVPHGAAHGSRYSSFSSVNKYGKHGDEKHHSSKKHEGNDGEGEKKKKSKKHKDHDGEKKKSKKHKDNEDAESVKSKKHKSHDCEKKKSKKHKDNEDAESVKSKKSVKEKGEKHNGKKPCSKKTNEENKNKEKTNNLKSDGSK

SEQ ID NO: 3661 - protein, 37 aa, Plasmodium falciparum
HLPYYEECKNIVHYIMKKKHKKIKNIINNHNSNLYYH

SEQ ID NO: 3662 - protein, 4 aa, Plasmodium falciparum
KHKK

SEQ ID NO: 3663 - protein, 21 aa, Plasmodium falciparum
HYNIIDTFVKRMNKEYMCFNK

SEQ ID NO: 3664 - protein, 87 aa, Mycobacterium mucogenicum; identical to SEQ ID NO: 3659

SEQ ID NO: 3665 - protein, 37 aa, Plasmodium falciparum; identical to SEQ ID NO: 3661

SEQ ID NO: 3666 - protein, 19 aa, Human immunodeficiency virus
HCLVCKQKKGLGISYGRKK

SEQ ID NO: 3667 - protein, 38 aa, Plasmodium falciparum
KSDHNHKSDHNHKSDHDHKSDHNHKSDPNHKKKNNNNK

SEQ ID NO: 3668 - protein, 42 aa, Plasmodium falciparum
KKDKEKKKDSNENRKKKKKKQKEDKKNDNKLKKLEYTNKLTH

SEQ ID NO: 3669 - protein, 16 aa, Homo sapiens
KTKKGNRVSPTMKVTH

SEQ ID NO: 3670 - protein, 17 aa, Homo sapiens
KHKEKMSKDGKKKKKKS

SEQ ID NO: 3671 - protein, 23 aa, Human immunodeficiency virus
  MOD_RES (1)..(1): Lys, His, Arg, Tyr, Ile, Ser, Val, Ala, Phe, Pro or Gln
  MOD_RES (3)..(3): Ser, Cys or Trp
  MOD_RES (4)..(4): Tyr, Phe, Pro or Ser
  MOD_RES (7)..(7): Gln or Leu
  MOD_RES (8)..(8): Val, Ile, Leu, Ser or Arg
  MOD_RES (10)..(10): Phe or Leu
  MOD_RES (11)..(11): Gln, His, Ile, Leu, Met or Asn
  MOD_RES (12)..(12): Lys, Thr, His, Met or Ser
  MOD_RES (14)..(14): Gly, Ala, Gln or Arg
  MOD_RES (16)..(16): Gly, Ala, Val or Ser
  MOD_RES (17)..(17): Ile or Leu
  MOD_RES (18)..(18): Ser or Tyr
  MOD_RES (19)..(19): Tyr or His
  MOD_RES (20)..(20): Gly or Gln
XCXXHCXXCXXXKXLXXXXXRKK

SEQ ID NO: 3672 - protein, 29 aa, Goose influenza virus
KKGTSYPKLSKSYTNNKGKEVLVLWGVHH

SEQ ID NO: 3673 - protein, 29 aa, Human influenza virus
KKGSSYPKLSKSYVNNKGKEVLVLWGVHH

SEQ ID NO: 3674 - protein, 29 aa, Human influenza virus
KKENSYPKLSKSYVNNKGKEVLVLWGVHH

SEQ ID NO: 3675 - protein, 29 aa, Human influenza virus
KKGDSYPKLTNSYVNNKGKEVLVLWGVHH

SEQ ID NO: 3676 - protein, 29 aa, Human influenza virus
KKGTSYPKLSKSYTNNKGKEVLVLWGVHH

SEQ ID NO: 3677 - protein, 29 aa, Human influenza virus
KKGTSYPKLSKSYTNNKGKEVLVLWGVHH

SEQ ID NO: 3678 - protein, 29 aa, Pig Influenza virus
KKGNSYPKLSKSYTNNKGKEVLVIWGVHH

SEQ ID NO: 3679 - protein, 29 aa, Pig Influenza virus
KKGNSYPKLSKSYTNNKGKEVLVIWGVHH

SEQ ID NO: 3680 - protein, 29 aa, Pig Influenza virus
KKGNSYPKLSKSYTNNKGKEVLVIWGVHH

SEQ ID NO: 3681 - protein, 29 aa, Human influenza virus
KKGTSYPKLSKSYTNNKGKEVLVLWGVHH

SEQ ID NO: 3682 - protein, 29 aa, Pig Influenza virus
KKGNSYPKLSKSYTNNKGKEVLVIWGVHH

SEQ ID NO: 3683 - protein, 29 aa, Pig Influenza virus
KKGNSYPKLSKSYTNNKGKEVLVIWGVHH

SEQ ID NO: 3684 - protein, 29 aa, Pig Influenza virus
KKGNSYPKLSKSYTNNKGKEVLVIWGVHH

SEQ ID NO: 3685 - protein, 29 aa, Human influenza virus
KKGNSYPKLSKSYTNNKGKEVLVIWGVHH

SEQ ID NO: 3686 - protein, 29 aa, Human influenza virus
KKGTSYPKLSKSYTNNKGKEVLVLWGVHH

SEQ ID NO: 3687 - protein, 29 aa, Pig Influenza virus
KKGNSYPKLSKSYTNNKGKEVLVIWGVHH

SEQ ID NO: 3688 - protein, 29 aa, Human influenza virus
KKGTSYPKLSKSYTNNKGKEVLVLWGVHH

SEQ ID NO: 3689 - protein, 29 aa, Pig Influenza virus
KKGNSYPKLSKSYTNNKGKEVLVIWGVHH

SEQ ID NO: 3690 - protein, 29 aa, Pig Influenza virus
KKGNSYPKLSKSYTNNKGKEVLVIWGVHH

SEQ ID NO: 3691 - protein, 29 aa, Pig Influenza virus
KKGNSYPKLSKSYTNNKGKEVLVIWGVHH

SEQ ID NO: 3692 - protein, 29 aa, Pig Influenza virus
KKGNSYPKLSKSYTNNKGKEVLVIWGVHH

SEQ ID NO: 3693 - protein, 29 aa, Pig Influenza virus
KKGNSYPKLSKSYTNNKGKEVLVIWGVHH

SEQ ID NO: 3694 - protein, 29 aa, Pig Influenza virus
KKGNSYPKLSKSYTNNKGKEVLVIWGVHH

SEQ ID NO: 3695 - protein, 29 aa, Pig Influenza virus
KKGNSYPKLSKSYTNNKGKEVLVIWGVHH

SEQ ID NO: 3696 - protein, 29 aa, Pig Influenza virus
KKGNSYPKLSKSYTNNKGKEVLVIWGVHH

SEQ ID NO: 3697 - protein, 29 aa, Pig Influenza virus
KKGNSYPKLSKSYTNNKGKEVLVIWGVHH

SEQ ID NO: 3698 - protein, 29 aa, Human influenza virus
KKGSSYPKLSKSYVNNKGKEVLVLWGVHH

SEQ ID NO: 3699 - protein, 29 aa, Human influenza virus
KKGSSYPKLSKSYVNNKGKEVLVLWGVHH

SEQ ID NO: 3700 - protein, 29 aa, Human influenza virus
KKGSSYPKLSKSYVNNKGKEVLVLWGVHH

SEQ ID NO: 3701 - protein, 28 aa, Human influenza virus
KNGLYPNLSKSYANNKEKEVLVLWGVHH

SEQ ID NO: 3702 - protein, 29 aa, Human influenza virus
KKGNSYPKLSKSYTNNKGKEVLVIWGVHH

SEQ ID NO: 3703 - protein, 28 aa, Human influenza virus
KNGLYPNLSKSYANNKEKEVLVLWGVHH

SEQ ID NO: 3704 - protein, 29 aa, Human influenza virus
KKGNSYPKLSKSYTNNKGKEVLVIWGVHH

SEQ ID NO: 3705 - protein, 28 aa, Human influenza virus
KNGLYPNLSKSYANNKEKEVLVLWGVHH

SEQ ID NO: 3706 - protein, 29 aa, Pig Influenza virus
KKGNSYPKLSKSYTNNKGKEVLVIWGVHH

SEQ ID NO: 3707 - protein, 28 aa, Human influenza virus
KNGLYPNLSKSYANNKEKEVLVLWGVHH

SEQ ID NO: 3708 - protein, 29 aa, Human influenza virus
KKGNSYPKLSKSYTNNKGKEVLVIWGVHH

SEQ ID NO: 3709 - protein, 29 aa, Human influenza virus
KKGSSYPKLSKSYVNNKGKEVLVLWGVHH

SEQ ID NO: 3710 - protein, 28 aa, Human influenza virus
KNGLYPNLSKSYANNKEKEVLVLWGVHH

SEQ ID NO: 3711 - protein, 29 aa, Pig Influenza virus
KKGNSYPKLSKSYTNNKGKEVLVIWGVHH

SEQ ID NO: 3712 - protein, 28 aa, Human influenza virus
KNGLYPNLSKSYANNKEKEVLVLWGVHH

SEQ ID NO: 3713 - protein, 29 aa, Pig Influenza virus
KKGNSYPKLSKSYTNNKGKEVLVIWGVHH

SEQ ID NO: 3714 - protein, 28 aa, Human influenza virus
KNGLYPNLSKSYANNKEKEVLVLWGVHH

SEQ ID NO: 3715 - protein, 28 aa, Human influenza virus
KNGLYPNLSKSYANNKEKEVLVLWGVHH

SEQ ID NO: 3716 - protein, 29 aa, Human influenza virus
KKGNSYPKLSKSYTNNKGKEVLVIWGVHH

SEQ ID NO: 3717 - protein, 28 aa, Human influenza virus
KNGLYPNLSKSYANNKEKEVLILWGVHH

SEQ ID NO: 3718 - protein, 28 aa, Human influenza virus
KNGLYPNLSKSYANNKEKEVLVLWGVHH

SEQ ID NO: 3719 - protein, 28 aa, Human influenza virus
KNGLYPNLSKSYANNKEKEVLVLWGVHH

SEQ ID NO: 3720 - protein, 28 aa, Human influenza virus
KNGLYPNLSKSYANNKEKEVLVLWGVHH

SEQ ID NO: 3721 - protein, 28 aa, Human influenza virus
KNGLYPNLSKSYANNKEKEVLVLWGVHH

SEQ ID NO: 3722 - protein, 28 aa, Human influenza virus
KNGLYPNLSKSYANNKEKEVLVLWGVHH

SEQ ID NO: 3723 - protein, 29 aa, Human influenza virus
KKGNSYPKISKSYINNKEKEVLVLWGIHH

SEQ ID NO: 3724 - protein, 29 aa, Human influenza virus
KKGNSYPKLSKSYINNKKKEVLVIWGIHH

SEQ ID NO: 3725 - protein, 29 aa, Human influenza virus
KKGNSYPKLSKSYINNKGKKVLVLWGIHH

SEQ ID NO: 3726 - protein, 29 aa, Human influenza virus
KKGTSYPKLSKSYTNNKKKEVLVLWGVHH

SEQ ID NO: 3727 - protein, 28 aa, Human influenza virus
KNGLYPNLSKSYANNKEKEVLVLWGVHH

SEQ ID NO: 3728 - protein, 28 aa, Human influenza virus
KNGLYPNLSKSYANNKEKEVLILWGVHH

SEQ ID NO: 3729 - protein, 29 aa, Human influenza virus
KKGPNYPVAKRSYNNTSGEQMLIIWGVHH

SEQ ID NO: 3730 - protein, 29 aa, Human influenza virus
KKGPNYPVAKRSYNNTSGEQMLIIWGIHH

SEQ ID NO: 3731 - protein, 29 aa, Human influenza virus
KKENSYPKLRKSIIINKKEVKLVIWGIHH

SEQ ID NO: 3732 - protein, 19 aa, Human influenza virus
KSYKNTRKDPALIIWGIHH

SEQ ID NO: 3733 - protein, 29 aa, Human influenza virus
KKNNAYPTIKRTYNNTNVEDLLILWGIHH

SEQ ID NO: 3734 - protein, 29 aa, Human influenza virus
KKNNAYPTIKRSYSNTNQEDLLVLWGIHH

SEQ ID NO: 3735 - protein, 29 aa, Human influenza virus
KKNNAYPTIKRTYNNTNIEDLLILWGIHH

SEQ ID NO: 3736 - protein, 29 aa, Human influenza virus
KKNNAYPTIKRTYNNTNMEDLLILWGIHH

SEQ ID NO: 3737 - protein, 29 aa, Human influenza virus
KKGNAYPTIKRTYNNTNVEDLLILWGIHH

SEQ ID NO: 3738 - protein, 29 aa, Human influenza virus
KKNNTYPTIKRSYNNTNQEDLLILWGIHH

SEQ ID NO: 3739 - protein, 29 aa, Human influenza virus
KKNSAYPTIKRSYNNTNQEDLLVLWGIHH

SEQ ID NO: 3740 - protein, 29 aa, Human influenza virus
KKNSAYPTIKRSYNNTNQEDLLVLWGIHH

SEQ ID NO: 3741 - protein, 29 aa, Human influenza virus
KKNSAYPTIKRSYNNTNQEDLLVLWGIHH

SEQ ID NO: 3742 - protein, 29 aa, Human influenza virus
KKNSAYPTIKRSYNNTNQEDLLVLWGIHH

SEQ ID NO: 3743 - protein, 29 aa, Human influenza virus
KKNSAYPTIKRSYNNTNQEDLLVLWGIHH

SEQ ID NO: 3744 - protein, 29 aa, Human influenza virus
KKNSAYPTIKRSYNNTNQEDLLVLWGIHH

SEQ ID NO: 3745 - protein, 29 aa, Human influenza virus
KKNNAYPTIKRSYNNTNQEDLLVLWGIHH

SEQ ID NO: 3746 - protein, 29 aa, Human influenza virus
KKNSTYPTIKRSYNNTNQEDLLVLWGIHH

SEQ ID NO: 3747 - protein, 29 aa, Human influenza virus
KKNSAYPTIKRSYNNTNQEDLLVLWGIHH

SEQ ID NO: 3748 - protein, 29 aa, Human influenza virus
KKNSTYPTIKRSYNNTNQEDLLVLWGIHH

SEQ ID NO: 3749 - protein, 29 aa, Human influenza virus
KKNSTYPTIKRSYNNTNQEDLLVLWGIHH

SEQ ID NO: 3750 - protein, 29 aa, Human influenza virus
KKNSTYPTIKRSYNNTNQEDLLVLWGIHH

SEQ ID NO: 3751 - protein, 29 aa, Human influenza virus
KKNSTYPTIKRSYNNTNQEDLLVLWGIHH

SEQ ID NO: 3752 - protein, 29 aa, Human influenza virus
KKNSTYPTIKRSYNNTNQEDLLVLWGIHH

SEQ ID NO: 3753 - protein, 29 aa, Human influenza virus
KKNNAYPTIKRSYNNTNQEDLLVLWGIHH

SEQ ID NO: 3754 - protein, 29 aa, Human influenza virus
KKNSTYPTIKRSYNNTNQEDLLVMWGIHH

SEQ ID NO: 3755 - protein, 29 aa, Human influenza virus
KKNSAYPTIKRSYNNTNQEDLLVLWGIHH

SEQ ID NO: 3756 - protein, 29 aa, Human influenza virus
KKNSTYPTIKRSYNNTNQEDLLVLWGIHH

SEQ ID NO: 3757 - protein, 29 aa, Human influenza virus
KKNSTYPTIKRSYNNTNQEDLLVLWGIHH

SEQ ID NO: 3758 - protein, 29 aa, Human influenza virus
KKNSTYPTIKRSYNNTNQEDLLVLWGIQH

SEQ ID NO: 3759 - protein, 29 aa, Human influenza virus
KKNSAYPIIKRSYNNTNQEDLLVLWGIHH

SEQ ID NO: 3760 - protein, 29 aa, Goose Influenza virus
  MOD_RES (13)..(13): Variable amino acid
KKNSAYPTIKRSXNNTNHEDLLVLWGIHH

SEQ ID NO: 3761 - protein, 29 aa, Human influenza virus
KKNSAYPTIKRSYNNTNQEDLLVLWGIHH

SEQ ID NO: 3762 - protein, 29 aa, Turkey Influenza virus
KKNNAYPTIKRSYNNTNQEDLLVLWGIHH

SEQ ID NO: 3763 - protein, 29 aa, Human influenza virus
KKNSTYPTIKRSYNNTNQEDLLVLWGIHH

SEQ ID NO: 3764 - protein, 29 aa, Human influenza virus
KKDNAYPTIKRSYNNTNQEDLLVLWGIHH

SEQ ID NO: 3765 - protein, 29 aa, Human influenza virus
KKNNTYPTIKRSYNNTNQEDLLILWGIHH

SEQ ID NO: 3766 - protein, 29 aa, Human influenza virus
KKNNTYPTIKKSYNNTNQEDLLVLWGIHH

SEQ ID NO: 3767 - protein, 29 aa, Human influenza virus
KKNSTYPTIKKSYNNTNQEDLLVLWGIHH

SEQ ID NO: 3768 - protein, 29 aa, Human influenza virus
KKNRTYPTIKKSYNNTNQEDLLVLWGIHH

SEQ ID NO: 3769 - protein, 29 aa, Human influenza virus
KKNNTYPTIKRSYNNTNQEDLLVLWGIHH

SEQ ID NO: 3770 - protein, 29 aa, Human influenza virus
KKNSTYPTIKESYNNTNQEDLLVLWGIHH

SEQ ID NO: 3771 - protein, 29 aa, Human influenza virus
KKDNAYPTIKRSYNNTNQEDLLVLWGIHH

SEQ ID NO: 3772 - protein, 29 aa, Human influenza virus
KKNDAYPTIKRSYNNTNQEDLLVLWGIHH

SEQ ID NO: 3773 - protein, 29 aa, Human influenza virus
KKDNAYPTIKRSYNNTNQEDLLVLWGIHH

SEQ ID NO: 3774 - protein, 29 aa, Human influenza virus
KKNDTYPTIKRSYNNTNQEDLLVLWGIHH

SEQ ID NO: 3775 - protein, 29 aa, Goose Influenza virus
KKGTSYPKLSKSYTNNKGKEVLVLWGVHH

SEQ ID NO: 3776 - protein, 29 aa, Pig Influenza virus
KKGNSYPKLSKSYTNNKGKEVLVIWGVHH

SEQ ID NO: 3777 - protein, 29 aa, Shrimp White Spot Syndrome virus
KKNVKSAKQLPHLKVLKKLDVRGAKQLPH

SEQ ID NO: 3778 - protein, 28 aa, Shrimp White Spot Syndrome virus
KVHLDVKGVKQLLHLKVRLDVRGAKQLH

SEQ ID NO: 3779 - protein, 29 aa, Human influenza virus
KKENSYPKLRKSIIINKKEVKLVIWGIHH

SEQ ID NO: 3780 - protein, 19 aa, Human influenza virus
KSYKNTRKDPALIIWGIHH

SEQ ID NO: 3781 - protein, 29 aa, Human influenza virus
KKGPNYPVAKRSYNNTSGEQMLIIWGVHH

SEQ ID NO: 3782 - protein, 29 aa, Human influenza virus
KKGPNYPVAKRSYNNTSGEQMLIIWGIHH

SEQ ID NO: 3783 - protein, 29 aa, Human influenza virus
KKNNAYPTIKRTYNNTNVEDLLILWGIHH

SEQ ID NO: 3784 - protein, 29 aa, Human influenza virus
KKNNAYPTIKRSYSNTNQEDLLVLWGIHH

SEQ ID NO: 3785 - protein, 32 aa, Shrimp Taura syndrome virus; identical to SEQ ID NO: 661

SEQ ID NO: 3786 - protein, 33 aa, Shrimp Taura syndrome virus; identical to SEQ ID NO: 662

SEQ ID NO: 3787 - protein, 222 aa, Viral Hemorrhagic Septicemia virus
YPFFPEPSCIWMKDNVHKDITHYYKTPKTVSIDLYSRKFLNPDFIEGVCTTSPCPTHWQGVYWIGATPQAHCPTSETLEGHLFTRTHDHRVVKAIVAGHHPWGLTMACTVTFCGAEWIKTDLGDLIKVTGQGGAKKLSPRKCVNTDIQMRGATDDFSYLNHLITNMAQRTECLDAHSDITASGKISSFLLSKFRPSHPGPGKAHYLLDGQIMRGECDYEAVV

SEQ ID NO: 3788 - protein, 12 aa, Viral Hemorrhagic Septicemia virus
HKDITHYYKTPK

SEQ ID NO: 3789 - protein, 22 aa, Viral Hemorrhagic Septicemia virus
HKDITHYYKTPKTVSIDLYSRK

SEQ ID NO: 3790 - protein, 9 aa, Viral Hemorrhagic Septicemia virus
HKDITHYYK

SEQ ID NO: 3791 - protein, 40 aa, Viral Hemorrhagic Septicemia virus
KDITHYYKTPKTVSIDLYSRKFLNPDFIEGVCTTSPCPTH

SEQ ID NO: 3792 - protein, 8 aa, Viral Hemorrhagic Septicemia virus
KDITHYYK

SEQ ID NO: 3793 - protein, 11 aa, Viral Hemorrhagic Septicemia virus
KDITHYYKTPK

SEQ ID NO: 3794 - protein, 17 aa, Viral Hemorrhagic Septicemia virus
HYYKTPKTVSIDLYSRK

SEQ ID NO: 3795 - protein, 30 aa, Viral Hemorrhagic Septicemia virus
KTVSIDLYSRKFLNPDFIEGVCTTSPCPTH

SEQ ID NO: 3796 - protein, 47 aa, Viral Hemorrhagic Septicemia virus; identical to SEQ ID NO: 1637

SEQ ID NO: 3797 - protein, 41 aa, Viral Hemorrhagic Septicemia virus; identical to SEQ ID NO: 1638

SEQ ID NO: 3798 - protein, 49 aa, Viral Hemorrhagic Septicemia virus; identical to SEQ ID NO: 1639

SEQ ID NO: 3799 - protein, 50 aa, Viral Hemorrhagic Septicemia virus; identical to SEQ ID NO: 1640

SEQ ID NO: 3800 - protein, 47 aa, Viral Hemorrhagic Septicemia virus; identical to SEQ ID NO: 1641

SEQ ID NO: 3801 - protein, 48 aa, Viral Hemorrhagic Septicemia virus; identical to SEQ ID NO: 1642

SEQ ID NO: 3802 - protein, 39 aa, Viral Hemorrhagic Septicemia virus; identical to SEQ ID NO: 1643

SEQ ID NO: 3803 - protein, 29 aa, Viral Hemorrhagic Septicemia virus
HHPWGLTMACTVTFCGAEWIKTDLGDLIK

SEQ ID NO: 3804 - protein, 37 aa, Viral Hemorrhagic Septicemia virus; identical to SEQ ID NO: 1645

SEQ ID NO: 3805 - protein, 38 aa, Viral Hemorrhagic Septicemia virus; identical to SEQ ID NO: 1646

SEQ ID NO: 3806 - protein, 43 aa, Viral Hemorrhagic Septicemia virus; identical to SEQ ID NO: 1647

SEQ ID NO: 3807 - protein, 28 aa, Viral Hemorrhagic Septicemia virus
HPWGLTMACTVTFCGAEWIKTDLGDLIK

SEQ ID NO: 3808 - protein, 36 aa, Viral Hemorrhagic Septicemia virus; identical to SEQ ID NO: 1649

SEQ ID NO: 3809 - protein, 37 aa, Viral Hemorrhagic Septicemia virus; identical to SEQ ID NO: 1650

SEQ ID NO: 3810 - protein, 42 aa, Viral Hemorrhagic Septicemia virus; identical to SEQ ID NO: 1651

SEQ ID NO: 3811 - protein, 43 aa, Viral Hemorrhagic Septicemia virus; identical to SEQ ID NO: 1652

SEQ ID NO: 3812 - protein, 35 aa, Viral Hemorrhagic Septicemia virus; identical to SEQ ID NO: 1653

SEQ ID NO: 3813 - protein, 50 aa, Viral Hemorrhagic Septicemia virus; identical to SEQ ID NO: 1654

SEQ ID NO: 3814 - protein, 43 aa, Viral Hemorrhagic Septicemia virus
KKLSPRKCVNTDIQMRGATDDFSYLNHLITNYMAQRTECLDAH

SEQ ID NO: 3815 - protein, 27 aa, Viral Hemorrhagic Septicemia virus
KKLSPRKCVNTDIQMRGATDDFSYLNH

SEQ ID NO: 3816 - protein, 42 aa, Viral Hemorrhagic Septicemia virus; identical to SEQ ID NO: 1657

SEQ ID NO: 3817 - protein, 32 aa, Viral Hemorrhagic Septicemia virus; identical to SEQ ID NO: 1658

SEQ ID NO: 3818 - protein, 27 aa, Viral Hemorrhagic Septicemia virus
HSDITASGKISSFLLSKFRPSHPGPGK

SEQ ID NO: 3819 - protein, 17 aa, Viral Hemorrhagic Septicemia virus
HSDITASGKISSFLLSK

SEQ ID NO: 3820 - protein, 21 aa, Viral Hemorrhagic Septicemia virus
KISSFLLSKFRPSHPGPGKAH

SEQ ID NO: 3821 - protein, 14 aa, Viral Hemorrhagic Septicemia virus
KISSFLLSKFRPSH

SEQ ID NO: 3822 - protein, 11 aa, Viral Hemorrhagic Septicemia virus
KFRPSHPGPGK

SEQ ID NO: 3823 - protein, 13 aa, Viral Hemorrhagic Septicemia virus
KFRPSHPGPGKAH
